(19) United States
(12) Patent Application Publication
(10) Pub. No.: US 2007/0082347 A1
(43) Pub. Date: Apr. 12, 2007

(54) Gene variants and use thereof

(75) Inventors: Jerry Lanchbury, Salt Lake City, UT (US); Alexander Gutin, Sandy, UT (US); Andrey Zharkikh, Salt Lake City, UT (US); Julia Reid, Salt Lake City, UT (US); Kirsten Timms, Salt Lake City, UT (US); Susanne Wagner, Salt Lake City, UT (US); Ann-Marie Woodland, Roy, UT (US)

Correspondence Address: MYRIAD GENETICS INC.;INTELLECUTAL PROPERTY DEPARTMENT, 320 WAKARA WAY, SALT LAKE CITY, UT, 84108, US

(73) Assignee: Myriad Genetics, Incorporated, Salt Lake City, UT (US)

(21) Appl. No.: 11/450,909

(22) Filed: Jun. 8, 2006

Related U.S. Application Data
(60) Provisional application No. 60/688,459, filed on Jun. 8, 2005.
(60) Provisional application No. 60/688,592, filed on Jun. 8, 2005.
(60) Provisional application No. 60/698,179, filed on Jul. 11, 2005.
(60) Provisional application No. 60/698,211, filed on Jul. 11, 2005.
(60) Provisional application No. 60/741,173, filed on Nov. 30, 2005.
(60) Provisional application No. 60/741,274, filed on Nov. 30, 2005.
(60) Provisional application No. 60/741,350, filed on Nov. 30, 2005.
(60) Provisional application No. 60/741,351, filed on Nov. 30, 2005.

(51) Int. Cl. C12Q 1/68; C07H 21/04; C12M 3/00

(52) U.S. Cl. 435/6; 536/23.2; 435/287.2; 257/E51.02; 977/924

(57) ABSTRACT

Variants in TLK1, WARS2, ARTS2, MSR, AKAP9, DNAJD1, GOLPH4, RABEP1, TAP2, NARG2, DDX58, CD39, FKBP1a, SRI, XRRA1, IRF5 and AMFR genes are disclosed which are useful as biomarkers for predicting the TLK1, WARS2, ARTS2, MSR, AKAP9, DNAJD1, GOLPH4, RABEP1, TAP2, NARG2, DDX58, CD39, FKBP1a, SRI, XRRA1, IRF5 or AMFR gene expression level and the biological functions associated thereof.

### CROSS-REFERENCE TO RELATED APPLICATIONS

[0001] This application claims priority under 35 U.S.C. § 119(e) to U.S. provisional application Ser. No. 60/698,211, filed Jul. 11, 2005; U.S. provisional application Ser. No. 60/741,350, filed Nov. 30, 2005; U.S. provisional application Ser. No. 60/688,592, filed Jun. 8, 2005; U.S. provisional application Ser. No. 60/741,274, filed Nov. 30, 2005; U.S. provisional application Ser. No. 60/688,459, filed Jun. 8, 2005; U.S. provisional application Ser. No. 60/741,173, filed Nov. 30, 2005; U.S. provisional application Ser. No. 60/741,351, filed Nov. 30, 2005; and U.S. provisional application Ser. No. 60/698,179, filed Jul. 11, 2005, all of which are hereby incorporated by reference in their entirety.

### REFERENCE TO A “SEQUENCE LISTING,” A TABLE, OR A COMPUTER PROGRAM LISTING APPENDIX SUBMITTED ON A COMPACT DISC

[0002] A Sequence Listing containing all relevant nucleotide and/or amino acid sequences has been submitted on 3 compact discs (CDs). The CD labeled “CRF” contains one file entitled “3107-01-1U 2006-06-08 SEQ-LIST-TXT.” Tables 1-81 are also contained in the accompanying CDs, labeled “Copy 1” and “Copy 2,” each containing two files entitled “3107-01-1U 2006-06-08 SEQ-LIST-TXT” and “3107-01-1U 2006-06-08 Tables TH.” The file “3107-01-1U 2006-06-08 SEQ-LIST-TXT” was created and written onto CD on Jun. 8, 2006, and is 854 kilobytes in size. The file “3107-01-1U 2006-06-08 Tables TH” was created and written onto CD on Jun. 8, 2006, and is 2.1 megabytes in size. The information contained on these CDs is hereby incorporated by reference in its entirety.

### FIELD OF THE INVENTION

[0003] This invention generally relates to pharmacogenetics, particularly to the identification of genetic variants that are associated with gene expression, and methods of using the identified variants.

### BACKGROUND OF THE INVENTION

[0004] Genetic polymorphic variations such as single-nucleotide polymorphisms (SNPs) are valuable tools for deciphering mechanisms of biological functions and understanding the underlying basis of human diseases. See generally, Cooper et al. in The Metabolic and Molecular Bases of Inherited Diseases, 1:259-291 (1995), Scriver et al., eds., McGraw-Hill, New York. SNPs are small variations in genomes. They are among the most common forms of human genetic variations. A large number of monogenic human diseases are associated with genetic polymorphic variations such as SNPs in the so-called susceptibility genes. For example, polymorphic variations in the coagulation factor gene F5 have been linked directly to deep-vein thrombosis. See Bertina et al., Nature, 369:64-67 (1994). SNPs in the Apolipoprotein E gene correlate with the risk of Alzheimer's disease. See U.S. Pat. No. 5,773,220.

[0005] Genetic polymorphic variations are also associated with varying response to drugs and natural environmental agents. See generally, McCarthy et al., Nat. Biotechnol., 18:505-508 (2000); Nebert, Am. J. Hum. Genet. 60:265-271 (1997); and Puga et al., Crit. Rev. Toxicol. 27(2):199-222 (1997). Pharmacogenomic studies have found a large number of SNPs associated with differing drug response. For example, genetic polymorphic variations in the 5-lipoxygenase gene, which codes for an anti-asthma drug target, have been linked to variations in drug response. See Drazen et al., Nat. Genet. 22:168-170 (1999). In addition, genetic variants in the drug-metabolizing enzyme thiopurine methyltransferase correlate with adverse drug reactions. See Krynetski et al., Pharm. Res., 16:342-349 (1999).

[0006] Since proteins are intimately involved in essential biological functions and drug metabolism, the apparent nexus between genetic polymorphic variations and human diseases and drug responses is not at all surprising since any gene sequence change may potentially affect gene expression and protein function. For example, SNPs in exons may lead to different protein sequences exhibiting altered protein activities (e.g., sickle cell anemia). SNPs in exons, and thus mRNAs, may also affect the splicing, processing, transport, translation, or stability of the mRNAs that contain them. See e.g., Cooper et al., in The Metabolic and Molecular Bases of Inherited Diseases, 1:259-291 (1995), Scriver et al., eds., McGraw-Hill, New York. SNPs in exons may also alter mRNA secondary or tertiary structures, i.e., mRNA folding, and thus affect post-transcriptional gene regulation. See Shen et al., Proc. Natl. Acad. Sci. USA, 96:7871-7876 (1999).

[0007] Polymorphic variations in non-coding regions have also been linked to diseases and other phenotypic effects. For example, SNPs in introns can affect mRNA splicing and thus alter gene expression. See e.g., Otterness et al., J. Clin. Invest., 101(5):1036-44 (1998); Hayashi et al., Growth Horm. IGF Res., 9:434-437 (1999); Tsai et al., Biochem. Mol. Med., 61:9-15 (1997); Yu et al., Atherosclerosis, 146:125-31 (1999); Nemer et al., Blood, 89:4608-16 (1997); States et al., Mutat. Res., 363:171-7 (1996). Genetic variations in intronic sequences may also influence gene transcription or interactions between gene transcription products and other cellular machines. Likewise, polymorphic variations in transcriptional regulatory regions of a gene may alter transcriptional patterns of the gene. See McGuigan et al., Osteoporos. Int., 11:338-43 (2000); Arnaud et al., Arterioscler. Thromb. Vasc. Biol., 20:892-898 (2000).

[0008] Very often, a genetic polymorphic variant alone does not cause any detectable effect on gene expression or gene function. However, it may act in concert with other known or unknown polymorphic variants in the gene and cause cumulative or synergistic effect sufficient to alter gene expression pattern or the properties of the protein encoded by the gene. Even if a particular genetic polymorphic variant does not contribute to any changes in gene expression or protein function, it may be near or linked to one or more other genetic variants that directly cause phenotypic defects. Therefore, by identifying such genetic variants, one could reasonably predict the phenotypic effect in an individual having such genetic variants. In addition, one can also identify haplotypes, that is, combinations of genetic variants in a particular gene or chromosome present in an individual. Haplotypes represent patterns of genetic variations and are important tools for genetic analysis and diagnosis.

[0009] Indeed, genetic polymorphic variations such as SNPs and haplotypes containing SNPs are invaluable genetic markers for a variety of applications. For example, genetic polymorphic variations are useful in genetic analysis for studying polymorphic allele segregation and polymorphism origins. In addition, genetic polymorphisms can be used as markers in population studies, and in forensic medicine. More importantly, SNPs can be particularly useful in genetic diagnoses for identifying individuals predisposed to certain diseases. See e.g., U.S. Pat. Nos. 5,994,080, 5,942,390, 5,773,220, and 5,736,323. Further, SNPs can also be valuable tools for predicting an individual's response to drug treatment or other exogenous interventions.

[0010] Thus, there is need in the art to identify additional SNPs in the human genome, particularly those associated with defined phenotypes.

### SUMMARY OF THE INVENTION

[0011] The present invention is based on the discovery of a number of genetic polymorphic variations, particularly SNPs and haplotypes, in the human autocrine motility factor receptor gene (“AMFR”), human tousled-like kinase 1 gene (“TLK1”), human mitochondrial tryptophanyl-tRNA synthetase gene (“WARS2”), human adipocyte-derived leucine aminopeptidase gene (“ARTS2”), human methionine synthase reductase gene (“MSR”), human A-kinase anchor protein 9 gene (“AKAP9”), human Homosapiens DnaJ (Hsp40) homolog, subfamily D, member 1 gene (“DNAJD1”), human golgi phosphoprotein gene (“GOLPH4”), human RAB GTPase binding effector protein 1 gene (“RABEP1”), human transporter associated with antigen processing gene (“TAP2”), human NMDA receptor regulated gene 2 gene (“NARG2”), human DEAD-box polypeptide 58 gene (“DDX58”), human CD39 antigen gene (“CD39”), human FK506-binding protein 1a gene (“FKBP1a”), human sorcin gene (“SRI”), human X-ray resistance associated protein gene (“XRRA1”), human interferon regulatory factor gene (“IRF”) and human autocrine motility factor receptor gene (“AMFR”). The SNPs and/or haplotypes are summarized in Tables 1-35. It has also been surprisingly discovered that the mRNA expression levels of these genes are inherited in a Mendelian manner in humans. Furthermore, the SNPs and/or haplotypes are associated with the heritable mRNA levels of the gene transcripts. Thus, the SNPs and haplotypes are useful in predicting mRNA levels of the genes in human cells and tissues, and thus can be useful in predicting the gene expression and the biological functions associated therewith.

[0012] For example, over-expression of AMFR induces a transformed phenotype and produces tumors in nude mice. Also, expression levels of AMFR in tumor cells correlate with the cells' potential to metastasize. Thus, the SNPs and haplotypes of the present invention in AMFR, which are associated with inheritable AMFR mRNA expression levels, are useful biomarkers for the prognosis of cancer in patients.

[0013] In addition, TLK1 overexpression increases resistance to DNA damage caused by ionizing radiation. Expression of a dominant-negative kinase TLK1 mutant results in chromosome missegregation and aneuploidy, indicating the role of TLK1 in preserving genetic integrity. Thus, the SNPs and haplotypes of the present invention in TLK1, which are associated with inheritable TLK1 mRNA expression levels, are useful biomarkers for the prediction of response to radiation treatment in patients.

[0014] Dysregulation of WARS2 expression has been associated with diseases such as cancer, neurodegenerative and cardiovascular disease. Thus, SNPs and haplotypes of the present invention in TLK1, of the present invention are useful as biomarkers for the prediction and detection of such diseases, and for determining cancer prognosis in a patient.

[0015] ARTS1 expression levels have been linked to tumor suppression, blood pressure regulation, immune response and autoimmune disease. Thus, SNPs associated with alterations in ARTS1 mRNA expression levels are useful as biomarkers to predict or detect susceptibility to such diseases in patients, and to predict patient response to the treatment of such diseases.

[0016] MSR is a critical enzyme in methionine metabolism, reducing methionine synthetase cofactor cobalamin to its active state. As such, MSR levels are central to efficient methionine metabolism. Methionine is also necessary for cancer cell proliferation in vitro. Accordingly, altering levels of MSR affects the level of methionine thereby altering the rate of cancer cell growth. Thus, the SNPs and haplotypes of the present invention, which are associated with MSR mRNA expression levels, are useful as biomarkers for diseases such as atherosclerosis, thrombosis, methylmalonicaciduria and cancer.

[0017] AKAP9 expression has been linked to neurodegenerative disorders, cardiovascular disease, cancer and depression in humans. The SNPs of the present invention associated with altered levels of AKAP9 mRNA expression are therefore useful to predict or detect susceptibility to neurodegenerative disorders, cardiovascular disease, cancer and depression.

[0018] DNAJD1 expression levels have been associated with resistance to chemotherapeutics in ovarian cancer, and polymorphisms predicting DNAJD1 levels have utility as predictive markers for therapeutic responses to apoptosis-inducing agents in cancer therapy. Thus, the SNPs of the present invention in the DNAJD1 gene, which are associated with altered DNAJD1 expression levels, are useful biomarkers for predicting the effectiveness of cancer treatments in patients.

[0019] Under-expression of GOLPH4 results in protein accumulation in early/recycling endosomes of those proteins that use the bypass pathway. Under-expression of GOLPH4 also inhibits invasion of cells by toxins. Therefore, GOLPH4 plays an important role in the movement of proteins and toxins from endosomes to the Golgi apparatus via the bypass pathway. Thus, the SNPs of the present invention in the GOLPH4 gene, which are associated with altered GOLPH4 expression levels, are useful biomarkers for determining the susceptibility of patients to toxins and pathogen invasion.

[0020] RABEP1 levels have been shown to influence endosomal trafficking associated with neurodegenerative diseases. Altered RABEP1 expression has also been associated with tumor formation and growth. Thus, SNPs associated with altered RABEP1 mRNA levels are useful as biomarkers to predict and detect susceptibility to cancer and neurodegenerative disease in an individual, as well as to predict tumor progression.

[0021] TAP2 mRNA expression levels correlate with expression of cell surface proteins involved in autoimmune function, immune response and cancer cell metastasis. Thus, SNPs associated with altered TAP2 mRNA expression levels are useful in the prediction and detection of susceptibility to autoimmune disease, viral infection and cancer development in an individual. The SNPs are also useful in determining the potential for progression of viral infection and cancer cell metastasis.

[0022] NARG2 expression levels increase in the absence of NMDA receptor 1 demonstrating the influence of NARG2 level on neuronal cell differentiation. Thus, the SNPs of the present invention showing an association with NARG2 mRNA expression levels are useful as a means of predicting/detecting susceptibility and/or progression of neurological disease in an individual.

[0023] DDX58 levels correlate with COX2 levels, which have been shown to have an association with cancer, mainly tumor formation and growth. DDX58 expression levels are also associated with the activity of natural killer cells and cytotoxicity in response to viral infection. Thus, SNPs associated with DDX58 mRNA levels are useful as biomarkers to predict and detect susceptibility to cancer and viral infection.

[0024] CD39 levels correlate with susceptibility to vascular injury and coronary syndromes. CD39 expression levels are also associated with rates of hemostasis and thromobosis. Further, levels of CD39 have been associated with the inflammatory response. Thus, SNPs associated with CD39 mRNA levels are useful as biomarkers to predict and detect susceptibility to vascular injury, coronary disease, transplant rejection and inflammatory response.

[0025] FKBP1a levels correlate with susceptibility to vascular injury and coronary syndromes. FKBP1a expression levels are also associated with rates of hemostasis and thromobosis. Further, levels of FKBP1a have been associated with the inflammatory response. Thus, SNPs associated with FKBP1a mRNA levels are useful as biomarkers to predict and detect susceptibility to vascular injury, coronary disease, transplant rejection and inflammatory response.

[0026] Expression levels of SRI have been associated with the prognosis and remission rate of acute myeloid lymphoma cancer. SRI expression levels are also associated with resistance to chemotherapeutics in vitro and in vivo. The expression of SRI has also been shown to be associated with increased cardiac contractility and recovery of cardiomyopathy. Thus, SNP associated with SRI mRNA levels are useful as biomarkers to predict prognosis and remission rates of cancer as well as patient response to treatment with chemotherapeutics. The SRI SNP of the present invention is also useful as a biomarker in detecting ability to recover from cardiovascular disease.

[0027] XRRA1 levels correlate with cell sensitivity to ionizing radiation. Thus, SNPs associated with XRRA1 mRNA expression levels are useful as biomarkers to predict and detect sensitivity to ionizing radiation.

[0028] IRF5 mRNA expression levels have been associated with immune response to viral infection in humans. Thus, SNPs of the present invention are useful as biomarkers to predict and detect susceptibility to and progression of viral infection in an individual.

[0029] Accordingly, in a first aspect of the present invention, an isolated TLK1, WARS2, ARTS2, MSR, AKAP9, DNAJD1, GOLPH4, RABEP1, TAP2, NARG2, DDX58, CD39, FKBP1a, SRI, XRRA1, IRF5 and AMFR nucleic acid variant is provided containing at least one of the newly discovered genetic variants, as summarized in Tables 1-35. The present invention also encompasses an isolated oligonucleotide comprising a contiguous span of at least 18, preferably from 18 to 50 nucleotides of the sequence of one of the above nucleic acid variants, wherein the contiguous span encompasses and contains a nucleotide variant selected from those in Tables 1-35.

[0030] DNA microchips are also provided comprising one or more isolated nucleic acid variants and/or one or more isolated oligonucleotides according to the present invention.

[0031] In accordance with another aspect of the invention, an isolated TLK1, WARS2, ARTS2, MSR, AKAP9, DNAJD1, GOLPH4, RABEP1, TAP2, NARG2, DDX58, CD39, FKBP1a, SRI, XRRA1, IRF5 and AMFR protein variant, or a fragment thereof, is provided comprising one or more amino acid variants selected from those in Tables 1-35.

[0032] The present invention also provides an isolated antibody specifically immunoreactive with a protein variant of the present invention.

[0033] In accordance with yet another aspect of the present invention, a method is provided for genotyping an individual by determining whether the individual has a nucleotide variant or an amino acid variant provided in accordance with the present invention. In addition, the present invention also provides a method for predicting in an individual the gene expression level or mRNA level of the TLK1, WARS2, ARTS2, MSR, AKAP9, DNAJD1, GOLPH4, RABEP1, TAP2, NARG2, DDX58, CD39, FKBP1a, SRI, XRRA1, IRF5 and AMFR genes. The method comprises the step of detecting in the individual the presence or absence of a nucleotide variant, or an amino acid variant, provided according to the present invention, which is associated with an inheritable mRNA expression level.

[0034] In accordance with another aspect of the invention, a detection kit is also provided for genotyping the nucleotide variant in an individual. In a specific embodiment, the kit is used in predicting the level of gene expression in an individual. The kit may include, in a carrier or confined compartment, any nucleic acid probes or primers, or antibodies useful for detecting the nucleotide variants or amino acid variants of the present invention as described herein. The kit can also include other reagents such as DNA polymerase, buffers, nucleotides and others that can be used in the method of detecting the variants according to this invention. In addition, the kit preferably also contains instructions for its use.

[0035] The foregoing and other advantages and features of the invention, and the manner in which the same are accomplished, will become more readily apparent upon consideration of the following detailed description of the invention taken in conjunction with the accompanying examples and drawings, which illustrate preferred and exemplary embodiments.

### BRIEF DESCRIPTION OF THE DRAWINGS

[0036] FIGS. 1-17 show the relative mRNA expression levels of the variant genotypes for particular SNPs in the TLK1, WARS2, ARTS2, MSR, AKAP9, DNAJD1, GOLPH4, RABEP1, TAP2, NARG2, DDX58, CD39, FKBP1a, SRI, XRRA1, IRF5 and AMFR genes. The relative expression is based on signal intensities from the RNA expression chips in a logarithmic fashion. For instance, a difference of one unit represents a two-fold difference in mRNA expression levels, whereas a difference of three represents an eight-fold increase in expression;

[0037] FIG. 1 is a plot illustrating the association of the TLK1 genotype at EX7@+190 with the TLK1 mRNA level. The figure shows the relative expression levels of the different genotypes C/C, T/C and T/T;

[0038] FIG. 2 is a plot illustrating the association of the WARS2 genotype at EX6@2152 with the WARS2 mRNA level. The figure shows the relative expression levels of the different genotypes G/G, A/G and A/A;

[0039] FIG. 3 is a plot illustrating the association of the ARTS1 genotype at EX19@328 with the ARTS1 mRNA level. The figure shows the relative expression levels of the different genotypes C/C, C/T and T/T;

[0040] FIG. 4 is a plot illustrating the association of the MSR genotype at EX7@146 with the MSR mRNA level. The figure shows the relative expression levels of the different genotypes A/G and A/A;

[0041] FIG. 5 is a plot illustrating the association of the AKAP9 genotype at EX10@186 with the AKAP9 mRNA level. The figure shows the relative expression levels of the different genotypes G/G, A/G and A/A;

[0042] FIG. 6 is a plot illustrating the association of the DNAJD1 genotype at EX1@368 with the corresponding DNAJD1 mRNA level. The figure shows the relative expression levels of the different genotypes T/T, T/C and C/C;

[0043] FIG. 7 is a plot illustrating the association of the GOLPH4 genotype at EX15@−85 with the GOLPH4 mRNA level. The figure shows the relative expression levels of the genotypes G/G and C/G;

[0044] FIG. 8 is a plot illustrating the association of the RABEP1 genotype at EX17@15 with the RABEP1 mRNA level. The figure shows the relative expression levels of the genotypes A/A, A/G and G/G;

[0045] FIG. 9 is a plot illustrating the association of the TAP2 genotype at EX12@61 with the TAP2 mRNA level. The figure shows the relative expression levels of the genotypes A/A, A/G and G/G;

[0046] FIG. 10 is a plot illustrating the association of the NARG2 genotype at EX12@48 with the NARG2 mRNA level. The figure shows the relative expression levels of the genotypes C/C, C/T and T/T;

[0047] FIG. 11 is a plot illustrating the association of the DDX58 genotype at EX14@+78 with the DDX58 mRNA level. The figure shows the relative expression levels of the genotypes C/C, C/T and T/T;

[0048] FIG. 12 is a plot illustrating the association of the CD39 genotype at 97,374,982 with the CD39 mRNA level. The figure shows the relative expression levels of the different genotypes G/G, A/G and A/A;

[0049] FIG. 13 is a plot illustrating the association of the CD39 genotype at 97,374,982 with the FKBP1a mRNA level. The figure shows the relative expression levels of the genotypes G/G, A/G and A/A;

[0050] FIG. 14 is a plot illustrating the association of the SRI genotype at EX9@351 with the SRI mRNA level. The figure shows the relative expression levels of the genotypes C/C, C/T and T/T;

[0051] FIG. 15 is a plot illustrating the association of the XRRA1 genotype at EX2@26 with the XRRA1 mRNA level. The figure shows the relative expression levels of the different genotypes C/C, C/G and G/G;

[0052] FIG. 16 is a plot illustrating the association of the IRF5 genotype at EX19@9328 with the IRF5 mRNA level. The figure shows the relative expression levels of the genotypes A/A, A/G and G/G; and

[0053] FIG. 17 is a plot illustrating the association of the AMFR genotype at EX14@483 with the AMFR mRNA level. The figure shows the relative expression levels of the genotypes G/G, G/A and A/A.

### DETAILED DESCRIPTION OF THE INVENTION

### 1. Definitions

[0054] The terms “genetic variant” and “nucleotide variant” are used herein interchangeably to refer to changes or alterations to, or variations in, the reference human TLK1, WARS2, ARTS2, MSR, AKAP9, DNAJD1, GOLPH4, RABEP1, TAP2, NARG2, DDX58, CD39, FKBP1a, SRI, XRRA1, IRF5 and AMFR gene or cDNA sequence at a particular locus, including, but not limited to, nucleotide base deletions, insertions, inversions, and substitutions in the coding and noncoding regions. Deletions may be of a single nucleotide base, a portion or a region of the nucleotide sequence of the gene, or of the entire gene sequence. Insertions may be of one or more nucleotide bases. The “genetic variant” or “nucleotide variant” may occur in transcriptional regulatory regions, untranslated regions of mRNA, exons, introns, or exon/intron junctions. The “genetic variant” or “nucleotide variant” may or may not result in stop codons, frame shifts, deletions of amino acids, altered gene transcript splice forms or altered amino acid sequence.

[0055] The term “allele” or “gene allele” is used herein to refer generally to a naturally occurring gene having a reference sequence or a gene containing a specific nucleotide variant.

[0056] As used herein, “haplotype” is a combination of genetic (nucleotide) variants in a region of an mRNA or a genomic DNA on a chromosome found in an individual. Thus, a haplotype includes a number of genetically linked polymorphic variants that are typically inherited together as a unit.

[0057] As used herein, the term “amino acid variant” is used to refer to an amino acid change to, or an amino acid variant of, a reference human TLK1, WARS2, ARTS2, MSR, AKAP9, DNAJD1, GOLPH4, RABEP1, TAP2, NARG2, DDX58, CD39, FKBP1a, SRI, XRRA1, IRF5 or AMFR amino acid sequence resulting from a “genetic variant” or “nucleotide variant” of the human gene encoding TLK1, WARS2, ARTS2, MSR, AKAP9, DNAJD1, GOLPH4, RABEP1, TAP2, NARG2, DDX58, CD39, FKBP1a, SRI, XRRA1, IRF5 or AMFR. The term “amino acid variant” is intended to encompass not only single amino acid substitutions, but also amino acid deletions, insertions, and other significant changes of amino acid sequence in TLK1, WARS2, ARTS2, MSR, AKAP9, DNAJD1, GOLPH4, RABEP1, TAP2, NARG2, DDX58, CD39, FKBP1a, SRI, XRRA1, IRF5 or AMFR.

[0058] The term “genotype” as used herein means the nucleotide characters at a particular nucleotide variant marker (or locus) in either one allele or both alleles of a gene (or a particular intergenic chromosome region). With respect to a particular nucleotide position of a gene of interest, the nucleotide(s) at that locus or equivalent thereof in one or both alleles form the genotype of the gene at that locus. A genotype can be homozygous, heterozygous or hemizygous. Accordingly, “genotyping” means determining the genotype, that is, the nucleotide(s) at a particular chromosome locus. Genotyping can also be done by determining the amino acid variant at a particular position of a protein which can be used to deduce the corresponding nucleotide variant(s).

[0059] The term “locus” refers to a specific position or site in a gene sequence, chromosome, or protein. Thus, there may be one or more contiguous nucleotides in a particular gene or chromosomal locus, or one or more amino acids at a particular locus in a polypeptide. Moreover, “locus” may also be used to refer to a particular position in a gene or chromosome where one or more nucleotides have been deleted, inserted, or inverted.

[0060] As used herein, the terms “polypeptide,” “protein,” and “peptide” are used interchangeably to refer to an amino acid chain in which the amino acid residues are linked by covalent peptide bonds. The amino acid chain can be of any length of at least two amino acids, including full-length proteins. Unless otherwise specified, the terms “polypeptide,” “protein,” and “peptide” also encompass various modified forms thereof, including but not limited to glycosylated forms, phosphorylated forms, etc.

[0061] The terms “primer”, “probe,” and “oligonucleotide” are used herein interchangeably to refer to a relatively short nucleic acid fragment or sequence. They can be DNA, RNA, or a hybrid thereof, or chemically modified analogs or derivatives thereof. Typically, they are single-stranded. However, they can also be double-stranded having two complementing strands that can be separated by denaturation. Normally, they have a length of from about 8 nucleotides to about 200 nucleotides, preferably from about 12 nucleotides to about 100 nucleotides, and more preferably about 18 to about 50 nucleotides. They can be labeled with detectable markers or modified in any conventional manners for various molecular biological applications.

[0062] The term “isolated” when used in reference to nucleic acids (e.g., genomic DNAs, cDNAs, mRNAs, or fragments thereof) is intended to mean that a nucleic acid molecule is present in a form that is substantially separated from other naturally occurring nucleic acids that are normally associated with the molecule. Specifically, since a naturally existing chromosome (or a viral equivalent thereof) includes a long nucleic acid sequence, an “isolated nucleic acid” as used herein means a nucleic acid molecule having only a portion of the nucleic acid sequence in the chromosome but not one or more other portions present on the same chromosome. More specifically, an “isolated nucleic acid” typically includes no more than 25 kb naturally occurring nucleic acid sequences which immediately flank the nucleic acid in the naturally existing chromosome (or a viral equivalent thereof). However, it is noted that an “isolated nucleic acid” as used herein is distinct from a clone in a conventional library such as genomic DNA library and cDNA library in that the clone in a library is still in admixture with almost all the other nucleic acids of a chromosome or cell. Thus, an “isolated nucleic acid” as used herein also should be substantially separated from other naturally occurring nucleic acids that are on a different chromosome of the same organism. Specifically, an “isolated nucleic acid” means a composition in which the specified nucleic acid molecule is significantly enriched so as to constitute at least 10% of the total nucleic acids in the composition.

[0063] An “isolated nucleic acid” can be a hybrid nucleic acid having the specified nucleic acid molecule covalently linked to one or more nucleic acid molecules that are not the nucleic acids naturally flanking the specified nucleic acid. For example, an isolated nucleic acid can be in a vector. In addition, the specified nucleic acid may have a nucleotide sequence that is identical to a naturally occurring nucleic acid or a modified form or mutein thereof having one or more mutations such as nucleotide substitution, deletion, insertion, inversion, and the like.

[0064] An isolated nucleic acid can be prepared from a recombinant host cell (in which the nucleic acids have been recombinantly amplified and/or expressed), or can be a chemically synthesized nucleic acid having a naturally occurring nucleotide sequence or an artificially modified form thereof.

[0065] The term “isolated polypeptide” as used herein is defined as a polypeptide molecule that is present in a form other than that found in nature. Thus, an isolated polypeptide can be a non-naturally occurring polypeptide. For example, an “isolated polypeptide” can be a “hybrid polypeptide.” An “isolated polypeptide” can also be a polypeptide derived from a naturally occurring polypeptide by additions or deletions or substitutions of amino acids. An isolated polypeptide can also be a “purified polypeptide” which is used herein to mean a composition or preparation in which the specified polypeptide molecule is significantly enriched so as to constitute at least 10% of the total protein content in the composition. A “purified polypeptide” can be obtained from natural or recombinant host cells by standard purification techniques, or by chemically synthesis, as will be apparent to skilled artisans.

[0066] The terms “hybrid protein,” “hybrid polypeptide,” “hybrid peptide,” “fusion protein,” “fusion polypeptide,” and “fusion peptide” are used herein interchangeably to mean a non-naturally occurring polypeptide or isolated polypeptide having a specified polypeptide molecule covalently linked to one or more other polypeptide molecules that do not link to the specified polypeptide in nature. Thus, a “hybrid protein” may be two naturally occurring proteins or fragments thereof linked together by a covalent linkage. A “hybrid protein” may also be a protein formed by covalently linking two artificial polypeptides together. Typically but not necessarily, the two or more polypeptide molecules are linked or “fused” together by a peptide bond forming a single non-branched polypeptide chain.

[0067] The term “high stringency hybridization conditions,” when used in connection with nucleic acid hybridization, means hybridization conducted overnight at 42° C. in a solution containing 50% formamide, 5×SSC (750 mM NaCl, 75 mM sodium citrate), 50 mM sodium phosphate, pH 7.6, 5× Denhardt's solution, 10% dextran sulfate, and 20 microgram/ml denatured and sheared salmon sperm DNA, with hybridization filters washed in 0.1×SSC at about 65° C. The term “moderate stringent hybridization conditions,” when used in connection with nucleic acid hybridization, means hybridization conducted overnight at 37° C. in a solution containing 50% formamide, 5×SSC (750 mM NaCl, 75 mM sodium citrate), 50 mM sodium phosphate, pH 7.6, 5× Denhardt's solution, 10% dextran sulfate, and 20 microgram/ml denatured and sheared salmon sperm DNA, with hybridization filters washed in 1×SSC at about 50° C. It is noted that many other hybridization methods, solutions and temperatures can be used to achieve comparable stringent hybridization conditions as will be apparent to skilled artisans.

[0068] For the purpose of comparing two different nucleic acid or polypeptide sequences, one sequence (test sequence) may be described to be a specific “percentage identical to” another sequence (comparison or reference sequence) in the present disclosure. In this respect, the percentage identity is determined by the algorithm of Karlin and Altschul, Proc. Natl. Acad. Sci. USA, 90:5873-5877 (1993), which is incorporated into various BLAST programs. Specifically, the percentage identity is determined by the “BLAST 2 Sequences” tool, which is available through the National Center for Biotechnology Information's (NCBI's) website. See Tatusova and Madden, FEMS Microbiol. Lett., 174(2):247-250 (1999). For pairwise DNA-DNA comparison, the BLASTN 2.1.2 program is used with default parameters (Match: 1; Mismatch: −2; Open gap: 5 penalties; extension gap: 2 penalties; gap x_dropoff: 50; expect: 10; and word size: 11, with filter). For pairwise protein-protein sequence comparison, the BLASTP 2.1.2 program is employed using default parameters (Matrix: BLOSUM62; gap open: 11; gap extension: 1; x_dropoff: 15; expect: 10.0; and wordsize: 3, with filter). Percent identity of two sequences is calculated by aligning a test sequence with a comparison sequence using BLAST 2.1.2, determining the number of amino acids or nucleotides in the aligned test sequence that are identical to amino acids or nucleotides in the same position of the comparison sequence, and dividing the number of identical amino acids or nucleotides by the number of amino acids or nucleotides in the comparison sequence. When BLAST 2.1.2 is used to compare two sequences, it aligns the sequences and yields the percent identity over defined, aligned regions. If the two sequences are aligned across their entire length, the percent identity yielded by the BLAST 2.1.1 is the percent identity of the two sequences. If BLAST 2.1.2 does not align the two sequences over their entire length, then the number of identical amino acids or nucleotides in the unaligned regions of the test sequence and comparison sequence is considered to be zero and the percent identity is calculated by adding the number of identical amino acids or nucleotides in the aligned regions and dividing that number by the length of the comparison sequence.

[0069] As used herein the term “linkage disequilibrium,” or “LD,” means that there is interdependence between alleles at loci closely positioned within a genome. More precisely, LD means that the probability to find allele A at locus 1 depends on whether allele B is present at locus 2. Complete LD means that alleles A and B are always found together. Pitchard and Przeworski, Am. J. Hum. Genet., 69:1-4 (2001) teaches a widely used measure of LD:
r²=(P(AB)−P(A)P(B))²/P(A)P(a)P(B)P(b),

[0070] where A and a are two alleles at locus 1, B and b are two alleles at locus 2, and P(X) is the probability of X

[0071] If LD is absent, then P(AB)=P(A)P(B), and, therefore, r²=0. In contrast, in the case of complete disequilibrium, P(AB)=P(A)=P(B), and, therefore, r²=1. In the case of partial LD, r² is between 0 and 1, and high values of r² correspond to strong LD. If allele A of locus 1 is associated with a disease, and there is a strong LD between locus 1 and locus 2, so that P(AB)>P(A)P(B), then allele B is associated with the disease too. To define strong LD, a threshold of r²>0.8 is usually used. See Carlson et al, Nat. Genet., 33(4):518-21 (2003). This threshold has been applied in identifying additional SNPs that are in LD with the disease, disorder or phenotype-associated SNP of the instant invention.

[0072] Thus, when a second nucleotide variant is said herein to be in linkage disequilibrium, or LD, with a first nucleotide variant, it is meant that a second variant is closely dependent upon a first variant, with a r² value of at least 0.8, as calculated by the formula above. Thus, the term “LD variants” as used herein means variants that are in linkage disequilibrium with an r² value of at least 0.8.

[0073] The term “reference sequence” refers to a polynucleotide or polypeptide sequence known in the art, including those disclosed in publicly accessible databases, e.g., Entrez or GenBank, or a newly identified gene sequence, used simply as a reference with respect to the nucleotide variants provided in the present invention. The nucleotide or amino acid sequence in a reference sequence is contrasted to the alleles disclosed in the present invention having newly discovered nucleotide or amino acid variants. In the instant disclosure, for TLK1 genomic DNA, the sequence provided by GenBank Accession No. AC007739 (PRI 7-Oct.-2000) or AC009953 (PRI 30-Sep.-2000) or AC010092 (PRI 08-Nov.-2000) is used as a reference sequence, while the nucleotide and amino acid sequences provided by GenBank Accession No. AB004885 (PRI 5-Feb.-1999) (see SEQ ID NOs:1 and 2) are used as the reference sequences for TLK1 cDNA and protein, respectively.

[0074] For WARS2 genomic DNA, the sequence provided by GenBank Accession No. AL139420 (PRI 18-May-2005), AL359823 (PRI 19-May-2005) and AL590288 (PRI 18-May-2005) are used as a reference sequence, while the nucleotide and amino acid sequences provided by GenBank Accession No. NM_{—}015836 (PRI 23-Apr.-2005) (see SEQ ID NO:18 and 19) and NM_{—}201263 (PRI 5-Jun.-2005) (see SEQ ID NOs:20 and 21) are used as the reference sequences for WARS2 cDNA and protein, respectively.

[0075] For ARTS2 genomic DNA, the sequence provided by GenBank Accession No. AC009073 (PRI 5-Jul.-2000) is used as a reference sequence, while the nucleotide and amino acid sequences provided by GenBank Accession No. NM_{—}016442 (PRI 23-Apr.-2005) (see SEQ ID NOs:30 and 31) and AF183569 (PRI 29-Dec.-1999) (see SEQ ID NOs:32 and 33) are used as the reference sequences for ARTS1 cDNA and protein, respectively.

[0076] For MSR genomic DNA, the sequence provided by GenBank Accession No. AC025174 (PRI 28-Mar.-2002) is used as a reference sequence, while the nucleotide and amino acid sequences provided by GenBank Accession No. NM_{—}002454 (PRI 22-Apr.-2005) (see SEQ ID NOs:66 and 67) and NM_{—}024010 (PRI 22-Apr.-2005) (see SEQ ID NOs:68 and 69) are used as the reference sequences for MSR cDNA and protein, respectively.

[0077] For AKAP9 genomic DNA, the sequence provided by GenBank Accession No. AC003086 (PRI 21-Dec.-1999) is used as a reference sequence, while the nucleotide and amino acid sequences provided by GenBank Accession No. NM_{—}005751 (PRI 5-Jun.-2005) (see SEQ ID NOs:90 and 91) are used as the reference sequences for AKAP9 cDNA and protein, respectively.

[0078] For DNAJD1 genomic DNA, the sequence provided by GenBank Accession No. AL445217 (PRI 18-May-2005) is used as a reference sequence, while the nucleotide and amino acid sequences provided by GenBank Accession No. NM_{—}013238 (PRI 24-May-2005) (see SEQ ID NOs:149 and 150) are used as the reference sequences for DNAJD1 cDNA and protein, respectively.

[0079] For GOLPH4 genomic DNA, the sequence provided by GenBank Accession No. AC117467 (PRI 1-Aug.-2002) and GenBank Accession No. AC069243 (PRI 28-SEP-2002) are used as a reference sequence, while the nucleotide and amino acid sequences provided by GenBank Accession No. NM_{—}014498 (PRI 22-Apr.-2005) (see SEQ ID NOs:156 and 157) are used as the reference sequences for GOLPH4 cDNA and protein, respectively.

[0080] For RABEP1 genomic DNA, the sequence provided by GenBank Accession No. NM_{—}004703 (PRI 8-Jun.-2005) is used as a reference sequence, while the nucleotide and amino acid sequences provided by GenBank Accession No. NM_{—}004703 (PRI 8-Jun.-2005) (see SEQ ID NOs:170 and 171) are used as the reference sequences for RABEP1 cDNA and protein, respectively.

[0081] For TAP2 genomic DNA, the sequence provided by GenBank Accession No. AL671681 (PRI 18-May-2005) is used as a reference sequence, while the nucleotide and amino acid sequences provided by GenBank Accession No. NM_{—}000544 (PRI 10-Jun.-2005) (see SEQ ID NO:202 and 203) and NM_{—}018833 (PRI 10-Jun.-2005) (see SEQ ID NO:204 and 205) are used as the reference sequences for TAP2 cDNA and protein, respectively.

[0082] For NARG2 genomic DNA, the sequence provided by GenBank Accession No. AC087385 (PRI 29-Jul.-2002) is used as a reference sequence, while the nucleotide and amino acid sequences provided by GenBank Accession No. NM_{—}024611 (PRI 8-Jun.-2005) (see SEQ ID NOs:230 and 231) are used as the reference sequences for NARG2 cDNA and protein, respectively.

[0083] For DDX58 genomic DNA, the sequences provided by GenBank Accession Nos. AL161783 (PRI 18-May-2005) and AL353671 (PRI 18-May-2005) are used as a reference sequence, while the nucleotide and amino acid sequences provided by GenBank Accession No. NM_{—}014314 (PRI 2-Apr.-2006) (see SEQ ID NOs:274 and 275) are used as the reference sequences for DDX58 cDNA and protein, respectively.

[0084] For CD39 genomic DNA, the sequences provided by GenBank Accession Nos. AL356632 (PRI 18-May-2005) and AL365273 (PRI 18-May-2005) are used as a reference sequence, while the nucleotide and amino acid sequence provided by GenBank Accession No. NM_{—}001776 (PRI 15-Oct.-2006) (see SEQ ID NOs:243 and 244) are used as the reference sequences for CD39 cDNA and protein, respectively.

[0085] For FKBP1a genomic DNA, the sequences provided by GenBank Accession Nos. AL136531 (PRI 18-May-2005) and AL109658 (PRI 18-May-2005) are used as a reference sequence, while the nucleotide and amino acid sequences provided by GenBank Accession No. NM_{—}000801 (PRI 6-Nov.-2005) (see SEQ ID NO:249 and 250) is used as the reference sequences for FKBP1a cDNA and protein, respectively.

[0086] For SRI genomic DNA, the sequences provided by GenBank Accession Nos. AC003991 (PRI 4-Feb.-2000) and AC005075 (PRI 2-Oct.-2000) are used as a reference sequences, while the nucleotide and amino acid sequences provided by GenBank Accession Nos. NM_{—}003130 (PRI 15-Jan.-2006) (see SEQ ID NO:253 and 254) are used as the reference sequences for SRI cDNA and protein, respectively.

[0087] For XRRA1 genomic DNA, the sequences provided by GenBank Accession Nos. AP000560 (PRI 15-Mar.-2003) and AP001992 (PRI 15-Mar.-2003) are used as a reference sequences, while the nucleotide and amino acid sequences provided by GenBank Accession Nos. XM_{—}374912 (PRI 19-Feb.-2004) (see SEQ ID NO:257 and 258) are used as the reference sequences for XRRA1 cDNA and protein, respectively.

[0088] For IRF5 genomic DNA, the sequences provided by GenBank Accession Nos. AC025594 (PRI 28-Nov.-2000) are used as a reference sequences, while the nucleotide and amino acid sequences provided by GenBank Accession Nos. NM_{—}002200 (PRI 18-Oct.-2005) (see SEQ ID NO:280) are used as the reference sequences for IRF5 cDNA and protein, respectively.

[0089] For AMFR genomic DNA, the sequence provided by GenBank Accession No. AC092140 (PRI 3-Jan.-2004) is used as a reference sequence, while the nucleotide sequences provided by GenBank Accession No. NM_{—}001144 (PRI 27-Oct.-2004) (see SEQ ID NO:1) and NM_{—}138958 (PRI 27-Oct.-2004) (SEQ ID NO:3) are used as the reference sequences for AMFR cDNA and protein, respectively.

[0090] As used herein, the term “TLK1 nucleic acid” means a nucleic acid molecule the nucleotide sequence of which is uniquely found in a TLK1 gene. That is, a “TLK1 nucleic acid” is either a TLK1 genomic DNA or mRNA/cDNA, having a naturally existing nucleotide sequence encoding a naturally existing TLK1 protein (wild-type or mutant form). The sequence of an example of a naturally existing TLK1 nucleic acid is found in GenBank Accession No. AB004885 (PRI 5-Feb.-1999) (see SEQ ID NO:1). Other examples include nucleic acids provided by GenBank Accession Nos. AK091975 (PRI 30-Jan.-2004) (see SEQ ID NO:14), AK090779 (PRI 30-Jan.-2004) (see SEQ ID NO:15) and NM_{—}012290 (PRI 23-Apr.-2005) (see SEQ ID NO:16).

[0091] As used herein, the term “TLK1 protein” means a polypeptide molecule the amino acid sequence of which is found uniquely in a TLK1 protein. That is, “TLK1 protein” is a naturally existing TLK1 protein (wild-type or mutant form). The sequence of a wild-type form of a TLK1 protein is provided by GenBank Accession No. AB004885 (PRI 5-Feb.-1999) (see SEQ ID NO:2). Other examples include amino acid sequences listed in GenBank Accession Nos. AK091975 (PRI 30-Jan.-2004), AK090779 (PRI 30-Jan.-2004) and NM_{—}012290 (PRI 23-Apr.-2005) (see SEQ ID NO:13).

[0092] As used herein, the term “WARS2 nucleic acid” means a nucleic acid molecule the nucleotide sequence of which is uniquely found in a WARS2 gene. That is, a “WARS2 nucleic acid” is either a WARS2 genomic DNA or mRNA/cDNA, having a naturally existing nucleotide sequence encoding a naturally existing WARS2 protein (wild-type or mutant form). The sequence of an example of a naturally existing WARS2 nucleic acid is found in GenBank Accession No. NM_{—}015836 (PRI 23-Apr.-2005) (see SEQ ID NO:18) and NM_{—}201263 (PRI 5-Jun.-2005) (SEQ ID NO:20).

[0093] As used herein, the term “WARS2 protein” means a polypeptide molecule the amino acid sequence of which is found uniquely in a WARS2 protein. That is, “WARS2 protein” is a naturally existing WARS2 protein (wild-type or mutant form). The sequence of a wild-type form of a WARS2 protein is found in GenBank Accession No. NM_{—}015836 (PRI 23-Apr.-2005) (see SEQ ID NO:19) and NM_{—}201263 (PRI 5-Jun.-2005) (SEQ ID NO:21).

[0094] As used herein, the term “ARTS1 nucleic acid” means a nucleic acid molecule the nucleotide sequence of which is uniquely found in an ARTS1 gene. That is, a “ARTS1 nucleic acid” is either an ARTS1 genomic DNA or mRNA/cDNA, having a naturally existing nucleotide sequence encoding a naturally existing ARTS1 protein (wild-type or mutant form). The sequences of examples of naturally existing ARTS1 nucleic acid are found in GenBank Accession No. NM_{—}016442 (PRI 23-Apr.-2005) (see SEQ ID NO:30) and AF183569 (PRI 29-Dec.-1999) (SEQ ID NO:32).

[0095] As used herein, the term “ARTS1 protein” means a polypeptide molecule the amino acid sequence of which is found uniquely in an ARTS1 protein. That is, “ARTS1 protein” is a naturally existing ARTS1 protein (wild-type or mutant form). The sequence of a wild-type form of an ARTS1 protein is found in GenBank Accession No. NM_{—}016442 (PRI 23-Apr.-2005) (see SEQ ID NO:31) and AF183569 (PRI 29-Dec.-1999) SEQ ID NO:33).

[0096] As used herein, the term “MSR nucleic acid” means a nucleic acid molecule the nucleotide sequence of which is uniquely found in a MSR gene. That is, a “MSR nucleic acid” is either an MSR genomic DNA or mRNA/cDNA, having a naturally existing nucleotide sequence encoding a naturally existing MSR protein (wild-type or mutant form). The sequence of an example of a naturally existing MSR nucleic acid is found in GenBank Accession No. NM_{—}002454 (PRI 22-Apr.-2005) (see SEQ ID NO:66) and NM_{—}024010 (PRI 22-Apr.-2005) (see SEQ ID NO:68).

[0097] As used herein, the term “MSR protein” means a polypeptide molecule the amino acid sequence of which is found uniquely in an MSR protein. That is, “MSR protein” is a naturally existing MSR protein (wild-type or mutant form). The sequence of a wild-type form of a MSR protein is found in GenBank Accession No. NM_{—}002454 (PRI 22-Apr.-2005) (see SEQ ID NO:67) and NM_{—}024010 (PRI 22-Apr.-2005) (see SEQ ID NO:69).

[0098] As used herein, the term “AKAP9 nucleic acid” means a nucleic acid molecule the nucleotide sequence of which is uniquely found in an AKAP9 gene. That is, an “AKAP9 nucleic acid” is either an AKAP9 genomic DNA or mRNA/cDNA, having a naturally existing nucleotide sequence encoding a naturally existing AKAP9 protein (wild-type or mutant form). The sequence of an example of a naturally existing AKAP9 nucleic acid is found in GenBank Accession No. NM_{—}005751 (PRI 8-Jun.-2005) (see SEQ ID NO:90), NM_{—}147171 (PRI 8-Jun.-2005) (see SEQ ID NO:92), NM_{—}147185 (PRI 8-Jun.-2005) (see SEQ ID NO:93), NM_{—}147166 (PRI 8-Jun.-2005) (see SEQ ID NO:94) and AK000270 (PRI 13-SEP-2003) (see SEQ ID NO:95).

[0099] As used herein, the term “AKAP9 protein” means a polypeptide molecule the amino acid sequence of which is found uniquely in an AKAP9 protein. That is, “AKAP9 protein” is a naturally existing AKAP9 protein (wild-type or mutant form). The sequence of a wild-type form of an AKAP9 protein is found in GenBank Accession No. NM_{—}005751 (PRI 8-Jun.-2005) (see SEQ ID NO:91).

[0100] As used herein, the term “DNAJD1 nucleic acid” means a nucleic acid molecule the nucleotide sequence of which is uniquely found in a DNAJD1 gene. That is, a “DNAJD1 nucleic acid” is either a DNAJD1 genomic DNA or mRNA/cDNA, having a naturally existing nucleotide sequence encoding a naturally existing DNAJD1 protein (wild-type or mutant form). The sequence of an example of a naturally existing DNAJD1 nucleic acid is found in GenBank Accession No. NM_{—}013238 (PRI 24-May-2005) (see SEQ ID NO:149).

[0101] As used herein, the term “DNAJD1 protein” means a polypeptide molecule the amino acid sequence of which is found uniquely in a DNAJD1 protein. That is, “DNAJD1 protein” is a naturally existing DNAJD1 protein (wild-type or mutant form). The sequence of a wild-type form of a DNAJD1 protein is found in GenBank Accession No. NM_{—}013238 (PRI 24-May-2005) (see SEQ ID NO:150).

[0102] As used herein, the term “GOLPH4 nucleic acid” means a nucleic acid molecule the nucleotide sequence of which is uniquely found in an GOLPH4 gene. That is, a “GOLPH4 nucleic acid” is either a GOLPH4 genomic DNA or mRNA/cDNA, having a naturally existing nucleotide sequence encoding a naturally existing GOLPH4 protein (wild-type or mutant form). The sequence of an example of a naturally existing GOLPH4 nucleic acid is found in GenBank Accession No. NM_{—}014498 (PRI 22-Apr.-2005) (see SEQ ID NO:156).

[0103] As used herein, the term “GOLPH4 protein” means a polypeptide molecule the amino acid sequence of which is found uniquely in an GOLPH4 protein. That is, “GOLPH4 protein” is a naturally existing GOLPH4 protein (wild-type or mutant form). The sequence of a wild-type form of a GOLPH4 protein is found in GenBank Accession No. NM_{—}014498 (PRI 22-Apr.-2005) (see SEQ ID NO:157).

[0104] As used herein, the term “RABEP1 nucleic acid” means a nucleic acid molecule the nucleotide sequence of which is uniquely found in an RABEP1 gene. That is, a “RABEP1 nucleic acid” is either an RABEP1 genomic DNA or mRNA/cDNA, having a naturally existing nucleotide sequence encoding a naturally existing RABEP1 protein (wild-type or mutant form). The sequence of an example of a naturally existing RABEP1 nucleic acid is found in GenBank Accession No. NM_{—}004703 (PRI 8-Jun.-2005) (see SEQ ID NO:170).

[0105] As used herein, the term “RABEP1 protein” means a polypeptide molecule the amino acid sequence of which is found uniquely in an RABEP1 protein. That is, “RABEP1 protein” is a naturally existing RABEP1 protein (wild-type or mutant form). The sequence of a wild-type form of a RABEP1 protein is found in GenBank Accession No. NM_{—}004703 (PRI 8-Jun.-2005) (see SEQ ID NO:171).

[0106] As used herein, the term “TAP2 nucleic acid” means a nucleic acid molecule the nucleotide sequence of which is uniquely found in a TAP2 gene. That is, a “TAP2 nucleic acid” is either a TAP2 genomic DNA or mRNA/cDNA, having a naturally existing nucleotide sequence encoding a naturally existing TAP2 protein (wild-type or mutant form). The sequence of an example of a naturally existing TAP2 nucleic acid is found in GenBank Accession No. NM_{—}000544 (PRI 10-Jun.-2005) (see SEQ ID NO:202) and NM_{—}018833 (PRI 10-Jun.-2005) (see SEQ ID NO:204).

[0107] As used herein, the term “TAP2 protein” means a polypeptide molecule the amino acid sequence of which is found uniquely in a TAP2 protein. That is, “TAP2 protein” is a naturally existing TAP2 protein (wild-type or mutant form). The sequence of a wild-type form of a TAP2 protein is found in GenBank Accession No. NM_{—}000544 (PRI 10-Jun.-2005) (see SEQ ID NO:203) and NM_{—}018833 (PRI 10-Jun.-2005) (see SEQ ID NO:205).

[0108] As used herein, the term “NARG2 nucleic acid” means a nucleic acid molecule the nucleotide sequence of which is uniquely found in an NARG2 gene. That is, a “NARG2 nucleic acid” is either an NARG2 genomic DNA or mRNA/cDNA, having a naturally existing nucleotide sequence encoding a naturally existing NARG2 protein (wild-type or mutant form). The sequence of an example of a naturally existing NARG2 nucleic acid is found in GenBank Accession No. NM_{—}024611 (PRI 8-Jun.-2005) (see SEQ ID NO:230).

[0109] As used herein, the term “NARG2 protein” means a polypeptide molecule the amino acid sequence of which is found uniquely in an NARG2 protein. That is, “NARG2 protein” is a naturally existing NARG2 protein (wild-type or mutant form). The sequence of a wild-type form of a NARG2 protein is found in GenBank Accession No. NM_{—}024611 (PRI 8-Jun.-2005) (see SEQ ID NO:231).

[0110] As used herein, the term “DDX58 nucleic acid” means a nucleic acid molecule the nucleotide sequence of which is uniquely found in a DDX58 gene. That is, a “DDX58 nucleic acid” is either a DDX58 genomic DNA or mRNA/cDNA, having a naturally existing nucleotide sequence encoding a naturally existing DDX58 protein (wild-type or mutant form). The sequence of an example of a naturally existing DDX58 nucleic acid is found in GenBank Accession No. NM_{—}014314 (PRI 2-Apr.-2006) (see SEQ ID NO:274).

[0111] As used herein, the term “DDX58 protein” means a polypeptide molecule the amino acid sequence of which is found uniquely in a DDX58 protein. That is, “DDX58 protein” is a naturally existing DDX58 protein (wild-type or mutant form). The sequence of a wild-type form of a DDX58 protein is found in GenBank Accession No. NM_{—}014314 (PRI 2-Apr.-2006) (see SEQ ID NO:275).

[0112] As used herein, the term “CD39 nucleic acid” means a nucleic acid molecule the nucleotide sequence of which is uniquely found in a CD39 gene. That is, a “CD39 nucleic acid” is either a CD39 genomic DNA or mRNA/cDNA, having a naturally existing nucleotide sequence encoding a naturally existing CD39 protein (wild-type or mutant form). The sequence of an example of a naturally existing CD39 nucleic acid is found in GenBank Accession Nos. NM_{—}001776 (PRI 15-Jan.-2006) (see SEQ ID NO:243).

[0113] As used herein, the term “CD39 protein” means a polypeptide molecule the amino acid sequence of which is found uniquely in a CD39 protein. That is, “CD39 protein” is a naturally existing CD39 protein (wild-type or mutant form). The sequence of a wild-type form of a CD39 protein is found in GenBank Accession No. NM_{—}001776 (PRI 15-Jan.-2006) (see SEQ ID NO:244).

[0114] As used herein, the term “FKBP1a nucleic acid” means a nucleic acid molecule the nucleotide sequence of which is uniquely found in a FKBP1a gene. That is, a “FKBP1a nucleic acid” is either a FKBP1a genomic DNA or mRNA/cDNA, having a naturally existing nucleotide sequence encoding a naturally existing FKBP1a protein (wild-type or mutant form). The sequence of an example of a naturally existing FKBP1a nucleic acid is found in GenBank Accession No. NM_{—}000801 (PRI 6-Nov.-2005) (see SEQ ID NO:249).

[0115] As used herein, the term “FKBP1a protein” means a polypeptide molecule the amino acid sequence of which is found uniquely in an FKBP1a protein. That is, “FKBP1a protein” is a naturally existing FKBP1a protein (wild-type or mutant form). The sequence of a wild-type form of an FKBP1a protein is found in GenBank Accession Nos. NM_{—}000801 (PRI 6-Nov.-2005) (see SEQ ID NO:250).

[0116] As used herein, the term “SRI nucleic acid” means a nucleic acid molecule the nucleotide sequence of which is uniquely found in an SRI gene. That is, an “SRI nucleic acid” is either an SRI genomic DNA or mRNA/cDNA, having a naturally existing nucleotide sequence encoding a naturally existing SRI protein (wild-type or mutant form). The sequences of exemplary naturally existing SRI nucleic acid are found in GenBank Accession No. NM_{—}003130 (PRI 15-Jan.-2006) (SEQ ID NO:253).

[0117] As used herein, the term “SRI protein” means a polypeptide molecule the amino acid sequence of which is found uniquely in an SRI protein. That is, an “SRI protein” is a naturally existing SRI protein (wild-type or mutant form). The sequence of a wild-type form of an SRI protein is found in GenBank Accession No. NM_{—}003130 (PRI 15-Jan.-2006) (SEQ ID NO:254).

[0118] As used herein, the term “XRRA1 nucleic acid” means a nucleic acid molecule the nucleotide sequence of which is uniquely found in an XRRA1 gene. That is, an “XRRA1 nucleic acid” is either an XRRA1 genomic DNA or mRNA/cDNA, having a naturally existing nucleotide sequence encoding a naturally existing XRRA1 protein (wild-type or mutant form). The sequences of exemplary naturally existing XRRA1 nucleic acid are found in GenBank Accession No. XM_{—}374912 (PRI 19-Feb.-2004) (SEQ ID NO:257).

[0119] As used herein, the term “XRRA1 protein” means a polypeptide molecule the amino acid sequence of which is found uniquely in an XRRA1 protein. That is, an “XRRA1 protein” is a naturally existing XRRA1 protein (wild-type or mutant form). The sequence of a wild-type form of an XRRA1 protein is found in GenBank Accession No. XM_{—}374912 (PRI 19-Feb.-2004) (SEQ ID NO:258).

[0120] As used herein, the term “IRF5 nucleic acid” means a nucleic acid molecule the nucleotide sequence of which is uniquely found in an IRF5 gene. That is, an “IRF5 nucleic acid” is either an IRF5 genomic DNA or mRNA/cDNA, having a naturally existing nucleotide sequence encoding a naturally existing IRF5 protein (wild-type or mutant form). The sequences of exemplary naturally existing IRF5 nucleic acid are found in GenBank Accession No. NM_{—}002200 (PRI 18-Oct.-2005) (see SEQ ID NO:280).

[0121] As used herein, the term “IRF5 protein” means a polypeptide molecule the amino acid sequence of which is found uniquely in an IRF5 protein. That is, an “IRF5 protein” is a naturally existing IRF5 protein (wild-type or mutant form). The sequence of a wild-type form of an IRF5 protein is found in GenBank Accession No. NM_{—}002200 (PRI 18-Oct.-2005) (see SEQ ID NO:281).

[0122] As used herein, the term “AMFR nucleic acid” means a nucleic acid molecule the nucleotide sequence of which is uniquely found in an AMFR gene. That is, an “AMFR nucleic acid” is either an AMFR genomic DNA or mRNA/cDNA, having a naturally existing nucleotide sequence encoding a naturally existing AMFR protein (wild-type or mutant form). The sequences of exemplary naturally existing AMFR nucleic acid are found in GenBank Accession No. NM_{—}001144 (PRI 27-Oct.-2004) (see SEQ ID NO:291) and NM_{—}138958 (PRI 27-Oct.-2004) (SEQ ID NO:293).

[0123] As used herein, the term “AMFR protein” means a polypeptide molecule the amino acid sequence of which is found uniquely in an AMFR protein. That is, an “AMFR protein” is a naturally existing AMFR protein (wild-type or mutant form). The sequence of a wild-type form of an AMFR protein is found in GenBank Accession No. NM_{—}001144 (PRI 27-Oct.-2004) (see SEQ ID NO:292) and NM_{—}138958 (PRI 27-Oct.-2004) (SEQ ID NO:294).

### 2. Nucleotide and Amino Acid Variants

[0124] Thus, in accordance with the present invention, genetic variants, i.e., single nucleotide polymorphisms (SNPs) and/or haplotypes have been discovered in the TLK1, WARS2, ARTS2, MSR, AKAP9, DNAJD1, GOLPH4, RABEP1, TAP2, NARG2, DDX58, CD39, FKBP1a, SRI, XRRA1, IRF5 and AMFR genes. The identified SNPs and/or haplotypes are summarized in Tables 1-35. Exemplary TLK1, WARS2, ARTS2, MSR, AKAP9, DNAJD1, GOLPH4, RABEP1, TAP2, NARG2, DDX58, CD39, FKBP1a, SRI, XRRA1, IRF5 and AMFR gene sequences spanning the SNPs in the tables are provided in the sequence listing.

[0125] The nucleotide positions are assigned by aligning the variant allele sequences to the above-identified cDNA reference sequence and genomic reference sequence. Specifically, the nucleotide position of a SNP is indicated relative to the nearest exon. As a general example, EX6@51 means the SNP is located within exon 6 of a gene at the 51^{st} nucleotide position counting in a 5′ to 3′ direction from the 5′ end of exon 6 with the 5′ end nucleotide of exon 6 being the 1^{st} position. EX7@+14 means the SNP is located within the intron immediately 3′ to exon 7 of a gene at the 14^{th} nucleotide position counting in a 5′ to 3′ direction from the 5′ end of that intron with the 5′ end nucleotide of that intron being the 1^{st} nucleotide position. EX13@−27 means the SNP is located within the intron immediately 5′ to exon 13 of the gene at the 27^{th} nucleotide position counting in a 3′ to 5′ direction from the 3′ end nucleotide of the intron with the 3′ end nucleotide of that intron being the 1^{st} nucleotide position. Likewise, EX1@−761 means that the SNP is located at the 761^{st} nucleotide position upstream from the 5′ end nucleotide of exon 1, with the first intron/regulatory nucleotide immediately 5′ to exon 1 being the 1^{st} nucleotide position.

[0126] The amino acid substitutions caused by the nucleotide variants (SNPs) are also identified according to conventional practice. For example, A160V means the amino acid variant at position 160 is V in contrast to A in the reference sequence identified above with the N-terminus amino acid being at position 1.

[0127] In some cases, the nucleotide positions and nucleotide variant identities are provided by reference to corresponding reference cluster ID (rs#) assigned in the public dbSNP database accessible at the NCBI website, or by chromosome locations.

[0128] Thus, the SNPs identified according to the present invention are associated with “expression phenotypes” in humans. That is, it has been discovered that the baseline expression level of the genes in Tables 1-35 in human cells is an inheritable “quantitative trait” with genetic determinants. Furthermore, it has been surprisingly discovered that the SNPs and haplotypes in accordance with the present invention are associated with the “quantitative trait”, i.e., the mRNA level of the genes in human cells. Thus, the SNPs and haplotypes are particularly useful in predicting the gene expression in an individual.

[0129] In response to DNA damage cells initiate a series of processes that prevent replication of damaged DNA and maintain integrity of the genome. The DNA damage checkpoint induces cell cycle arrest, allowing for repair mechanisms to occur before transmission of damaged chromosomes. DNA damage can be caused by a variety of agents including ultraviolet radiation (UV), mutagenic chemicals, radiation, free radicals and teratogens. Cancer and heart disease are among the diseases associated with damage to DNA. TLK1 has been identified as a regulator of the DNA damage checkpoint system. TLK1 is the mammalian homolog of the plant Tousled gene which regulates flower development. TLK1 is 84% similar to Tousled on an amino acid level and shares its kinase activity. TLK1 is a 81.9 kD nuclear localized kinase having 5-domains including an N-terminus nuclear localization signal, a protein kinase ATP-binding motif, a nucleotide binding motif, and a single catalytic domain near the C-terminus. See Sillje et al., EMBO. J., 18(20):5691-702 (1999). TLK1 phosphorylates ASF1, a chromatin assembly factor, implicating it in the regulation of chromatin remodeling. Mammalian TLKs have been implicated in regulation of chromatin remodeling through the observation that they phosphorylate the chromatin assembly factor ASF1. ASF1 synergizes with another chromatin assembly factor, CAF1, in replication- and repair-coupled chromatin remodeling. See Sillje et al., Curr Biol., 11(13):1068-73 (2001).

[0130] Underlining the importance of TLK1 in the preservation of genomic integrity, the normally active TLK1 is inhibited in the event of DNA damage such as a double-strand break (DSB). Inhibition of TLK depends on the action of the DNA damage checkpoint system including the kinases ATM (ataxia telangiectasia mutated) and ATR (ataxia and Rad3 related). ATM is a key regulator in response to ionizing radiation (IR), while ATR induces cell cycle arrest in response to a wide range of agents producing DNA double strand breaks. Both kinases relay the checkpoint signal through phosphorylation of checkpoint kinases: Chk2 (also known as Rad53) and Chk1. Inhibition of TLK1 in response to IR depends on ATM and Chk1, as well as the sensor protein NBS1. Expression of a dominant-negative kinase mutant of TLK1 results in chromosome missegregation and aneuploidy, underlining the importance of TLK1 in preserving genomic integrity. Experiments using mouse cell lines have shown that TLK1 overexpression increases cell resistance to DNA damage caused by ionizing radiation. See Sunalava-Dossabhoy et al., BMC Cell Biol., 4(1):16 (2003). Thus, expression levels of TLK1 affect the ability to control DNA damage and can be used to determine resistance to the DNA damage and susceptibility to diseases resulting from such carcinogens. Further, common cancer treatments that function by inducing DNA damage will be affected by TLK1 levels.

[0131] Histone H3, a modifier of chromatin condensation, is present in the cytosol at the highest levels during active DNA replication. See Senshu et al., Eur J. Biochem., 146(2):261-6 (1985). Phosphorylation of histone H3 influences transcription, chromosome condensation, DNA repair and apoptosis. TLK1 has been shown to phosphorylate histone H3 in vitro and in vivo. See Sunavala-Dossabhoy et al., BMC Cell Biol., 4(1): 16 (2003). Downregulation of histone H3 mRNA levels occurs in parallel with the inhibition of DNA synthesis during S-phase upon DNA damage. See Zhao, J., Cell Cycle., 3(6):695-7 (2004). Levels of TLK1 are elevated 9.4 times in patients with stage I to II breast cancer. See Norton et al., J Surg Res., 116(1):98-103 (2004). This suggests that TLK1 is linked to the S-phase DNA damage checkpoint and DNA replication in the cell. Thus, increased H3 histone phosphorylation as a result of TLK1 overexpression causes chromosome instability and, thus, may play a role in carcinogenesis. Accordingly, polymorphisms influencing expression levels of TLK1 would be useful in predicting cancer progression and response to radiation treatment as well as susceptibility to DNA damage by ionizing radiation. See Li et al., Oncogene., 20(6):726-38 (2001).

[0132] An isoform of TLK1, named SNAK for SNARE kinase, was shown to phosphorylate SNAP-23, a component of the SNARE complex. SNAP-23 is the ubiquitiously expressed homolog of the neuron-specific SNAP-25 and is essential for the regulation of exocytosis in several cell types. For example, fusion of GLUT4 containing vesicles with the plasma membrane involves the target membrane SNAREs syntaxin 4 and SNAP-23 and the vesicle-associated SNARE VAMP2. SNAP-23 is palmitoylated post-translationally and this acylated form readily associates with membranes. Phosphorylation increases the stability of SNAP-23 and promotes the formation of SNARE complexes. Expression levels of TLK1 could therefore influence the kinetics of SNARE assembly and contribute to SNARE associated metabolic disorders. See Cabaniols et al., Mol. Biol. Cell, 10(12):4033-4041 (1999).

[0133] WARS2 is the mitochondrial form of tryptophanyl-tRNA synthetase, the enzyme that links the nucleotide triplets in the genetic code to form amino acid units by catalyzing the loading of the tryptophan-specific tRNA with the amino acid tryptophan. WARS2 is a 360-amino acid 40.1 kDa α₂ dimer protein of the class IaaRSs. See Jorgensen et al., J. Biol. Chem., 275(22):16820-16826 (2002). Nearly 100 disease-correlated mutations in the mitochondrial genome are known to be located in mitochondrial tRNA genes. Mitochondrial dysfunction is a mechanism in the progression of neurodegenerative disorders such as Friedeich's ataxia, Huntington's disease, Alzheimer's disease amyotrophic lateral sclerosis (ALS) and Parkinson's disease. Although no specific disorders have been associated with WARS2 mutation, variations in the expression levels of WARS2 are likely to contribute to disorders associated with mutations in the corresponding mitochondrial tRNA gene. Thus, polymorphisms correlating with expression levels of WARS2 are useful to predict of detect susceptibility to neurodegenerative disease, such as Friedreich's ataxia, Huntington's disease, Alzheimer's disease, ALS and Parkinson's disease, in an individual.

[0134] Polymorphisms in mitochondrial DNA have also been linked to mitochondria dysfunction associated with cardiovascular disease. Such diseases include dilated and hypertrophic cardiomyopathy, cardiac conduction defects and sudden death, ischemic and alcoholic cardiomyopathy, and myocarditis. These abnormalities result in dysfunction in oxidative phosphorylation and fatty acid beta-oxidation. See Marin-Garcia, J. and Goldenthal, M. J., J. Card. Fail., 8(5):347-61 (2002). Thus, SNPs correlating with WARS2 mRNA expression levels are useful as a means of predicting or detecting susceptibility to cardiovascular disease in an individual.

[0135] An N-terminally truncated WARS2 fragment, T2-TrpRS, is a potent antagonist of vascular endothelial growth-factor induced angiogenesis. Particularly, T2-TrpRS regulates extracellular signal activated protein kinase, Akt, and EC NO synthase activation pathways involved in angiogenesis, cytoskeletal reorganization, and shear stress-responsive gene expression. Angiogenesis stimulating gene expression was shown to be linked to tumor progression in nude mice. See Yoneda et al., J. Natl. Cancer Inst., 90:447-454 (1998). Expression of T2-TrpRS blocks vascular endothelial growth factor-stimulated angiogenesis. Higher concentration of T2-TrpRS further decreased activity of VEGF-induced angiogenesis. See Otani et al., Proc. Natl. Acad. Sci. USA., 99(1):173083 (2002). Proteins demonstrating a similar angiogenesis inhibiting effect are currently used in the treatment of cancer to prevent the spread of cancer cells by blood vessel growth. See Langer, et al., Proc. Natl. Acad. Sci., 77(7):4331-5 (1980). As T2-TrpRS is a naturally occurring protein, it provides an advantage as a potentially nonimmunogenic compound for the treatment of cancer. See Otani et al., Proc. Natl. Acad. Sci. USA., 99(1):173083 (2002).

[0136] IFN-γ has been shown to be involved in an anti-tumorigenic signaling pathway making it useful in the prognosis and therapy of cancer. See Blanck, G., Arch. Immunol. Ther. Exp. 50(3):151-8 (2002). T2-TrpRS shows high expression in the presence of IFN-γ. T2-TrpRS is cleaved by PMN elastase protein, which is expressed in human colorectal cancer, breast cancer and non-small cell lung cancers (NSCLCs). The resulting truncated protein, TrpTS, acts as an angiostatic inhibitor slowing tumor growth. See Wakasugi et al., Proc. Natl. Acad. Sci. USA., 99(1):173-177 (2002). Accordingly, the SNPs associated with WARS2 expression levels can be used to predict or detect cancer susceptibility, to predict cancer prognosis in an individual.

[0137] ARTS1 is a 120 kD type II integral membrane aminopeptidase critical in the metabolism of proteins involved in processes such as blood pressure regulation, hypertension pathogenesis and immune response. ARTS1 creates bioactive peptides through hydrolysis of various inactive peptides within the ER. ARTS1 contains an N-terminal signal peptide, 5 potential N-glycosylation sites, a potential membrane-spanning domain, and a zinc-binding motif. See Hattori et al., J. Biochem., 125:931-938 (1999).

[0138] Coimmunoprecipitation assays have shown that ARTS1 binds TNFR1 to form a complex that promotes TNFR1 ecto-domain shedding. TNFR1 is a tumor necrosis factor that, in its cleaved state, is a multifunctional cytokine involved in the regulation of processes such as inflammatory response, immunoregulation, cytotoxicity, antiviral actions and transcriptional regulation of genes. See Vilcek and Lee, J. Biol. Chem., 266:7313-7316 (1991). ARTS1 levels directly correlate with TNFR1 shedding. Overexpression of ARTS1 mRNA results in increased TNFR shedding and diminished membrane-associated TNFR1. Conversely, the expression of anti-sense ARTS1 mRNA leads to decreased TNFR1 shedding and membrane associated ARTS1 as well as increased membrane associated TNFR1. See Cui et al., J Clin Invest., 110(4):515-26 (2002). TNFR1 shedding deficiencies have been associated with autoimmune diseases such as endotoxic shock, TNF-dependent arthritis, and encephalomyelitis. See Xanthoulea et al., J. Exp. Med. 200(3):367-76 (2004). In view of the above, SNPs associated with ARTS1 mRNA levels could be useful in the prediction and detection of susceptibility to autoimmune and inflammatory disease in humans.

[0139] Activation of vascular endothelial growth factor (VEGF) initiates cell proliferation and is a hallmark of tumor progression. Angiotensin II exposure induces VEGF activity in several cell types. Overexpression of ARTS1 in human endometrial carcinoma cells inhibited angiotensin II stimulated VEGF expression, suggesting that elevated ARTS1 levels reduce the amount of functional angiotensin II and suppress the proliferative effect of VEGF on tumor cells. See Wantanabe et al., Clin. Cancer Res., 9(17):6497-503 (2003). Thus, SNPs associated with ARTS1 mRNA expression levels are useful as a means of predicting or detecting cancer susceptibility, predicting cancer progression in an individual as well as and predicting patient response to cancer treatment.

[0140] Expression of ARTS1 in Chinese hamster ovary cells showed that ARTS1 hydrolyzes angiotensin II, a protein involved in the regulation of blood pressure. At high levels, angiotensin induces hypertension, cardiac hypertrophy, myocardial damage and coronary heart disease. See Caulfield et al., N. Engl. J. Med., 330(23):1629-33 (1994) and Finkenberg et al., J. Hypertens., 23(2):375-80 (2005). Treatment of patients with angiotensin-enzyme converting inhibitor A-I was shown to reduce death in ischemia patients. See Zuliana et al., J. Gerontol. A. Biol. Sci. Med. Sci., 60(4):463-5 (2005). Thus, SNPs associated with ARTS1 mRNA expression are useful to predict and detect susceptibility to heart disease in an individual.

[0141] Cell surface antigens detect and eliminate foreign cells such as those virally infected or tumorigenic. Before transport to the cell surface, antigen precursor proteins are synthesized in the cells endoplasmic reticulum (ER). Unprocessed precursor peptides bind on the surface of major histocompatibity complex (MHC) where ARTS1 has been shown to trim extra terminal residues from precursor proteins thereby creating 8-11 residue peptide fragments. These fragments are then transported to the cell surface facilitating cell recognition and elimination of virally infected cells. In other words, ARTS1 hydrolyzes proteins creating functional antigenic precursors necessary for immune system cell recognition. ARTS1 overexpression stimulates processing and presentation of antigenic precursors in the ER demonstrating the importance of ARTS1 levels in immune response. Further, agents that block precursor trimming in the ER have been shown to inhibit ARTS1 function. See Cui, et al., J. Clin. Invest., 110(4):515-526 (2002). Accordingly, ARTS1 levels could be used to predict immune response in an individual, especially that associated with viral infection.

[0142] MSR is an essential enzyme in folate/cobalamin metabolism. MSR functions by recycling cobalamin, a cofactor necessary for activation of the enzyme methionine synthetase (MS), which catalyzes the remethylation of homocysteine to methionine. See Wilson et al., Human Molecular Genetics, 8(11):2009-2016 (1999). As cobalamin is used, it becomes oxidized rendering it inactive. See Banerjee, R., Chem Biol., 4, 175-186 (1997). MSR catalyzes regeneration of cobalamin to its active state where it can be used as a cofactor activating MS. Active MS is necessary for catalyzing the final step in methionine synthesis. MSR polymorphisms S175 was shown to be a genetic determinant of plasma homocysteine levels. This polymorphism has been linked to premature coronary artery disease, Down's syndrome and neural tube defects. See Gaughan et al., Atherosclerosis, 157(2): 451-6 (2001) and Olteanu et al., Biochemistry, 43(7):1988-97 (2004) and Bosco et al., Am. J. Med. Genet. A., 121(3):219-24 (2003). Similarly, MSR mutations resulting in cobalamin deficiency have been shown to cause homocystinuria, hyperhomocysteinemia and hypomethioninemia. See Watkins et al., Am. J. Hum. Genet., 71(1):143-153 (2002).

[0143] Homocysteine is produced during the metabolism of methionine and can be remethylated to methionine through the action of MS. Elevated levels of homocysteine (hyperhomocysteinemia) have been linked to cardiovascular disease, atherosclerosis, recurrent arterial and venous thrombosis and premature coronary artery disease. See Cattaneo, M., Thromb Haemost., 81(2):165-76 (1999). MSR deficiency causes hyperhomocysteinemia, hypomethioninemia and megaloblastic aneimia showing the effect of MSR levels on homocysteine metabolism. See Wilson, et al., Hum. Mol. Genet., 8(11):2009-2016 (1999). Studies have also shown an association of hyperhomocysteinaemia with neural tube defects such as spina bifida. See Mills et al., Lancet, 345(8943):149-51 (1995) and D'Angelo et al., Haematologica, 82(2):211-9 (1997). Children with Down's syndrome have significantly lower plasma levels of homocysteine. See Pogribna et al., Am. J. Hum. Genet., 69(1):88-95 (2001). Wild-type minigene expression of MSR in patients having cb1E type homocystinuria resulted in a four-fold increase in MSR-facilitated methionine synthesis. This demonstrates the association of MSR levels with the conversion of homocysteine to methionine. See Zavadakova et al., Hum. Mutat., 25(3):239-47 (2005). Accordingly, SNPs associated with MSR expression levels are useful as markers for determining or predicting relative plasma homocysteine, methionine and cobalamin levels, and for diagnosing and/or predicting diseases and disorders associated with aberrant plasma homocysteine, methionine and cobalamin levels. In addition, the SNPs are also useful as markers for detecting or predicting a predisposition to hyperhomocysteinemia, cardiovascular disease, atherosclerosis, recurrent arterial and venous thrombosis and premature coronary artery disease, neural tube defects and Down's syndrome. The SNPs may also be useful in determining prognosis of hyperhomocysteinemia, cardiovascular disease, atherosclerosis, recurrent arterial and venous thrombosis and premature coronary artery disease, neural tube defects and Down's syndrome in an individual.

[0144] MSR facilitated methionine metabolism has also been associated with cancer cell proliferation. A number of cancer cell types are methionine dependent. In other words, the cells are unable to grow on a medium where methionine has been replaced with homocysteine precursor. The doubling time of non-small lung cell cancer lines was shown to have a significant association with levels of methionine synthetase. See Zhang et al., Cancer Res., 65(4): 1554-60 (2005). Since the SNPs and haplotypes described here are associated with the expression level of MSR, they can be used to predict cancer susceptibility and prognosis in patients.

[0145] The AKAP9 gene is one of a family of scaffolding proteins that are critical for the subcellular distribution and catalytic activity of the signaling mediator protein kinase A. AKAP9 protein has been shown to regulate ion channel activity, synaptic transmission and cell motility. Also known as AKAP350, AKAP450 and CGNAP, the 350-450 kDa protein has been shown to be localized to the centrosomes and the Golgi apparatus. See Steadman et al., J. Biol. Chem., 277(33):30165-76 (2002).

[0146] The Golgi apparatus functions in neurons by processing polypeptides important in fast axoplasmic transport. AKAP9 is expressed and interacts with CIP4 at the Golgi apparatus. Disruption of the AKAP9-CIP4 interaction through expression of the CIP4 binding domain in AKAP9 or silencing AKAP9 expression by RNA interference causes structural changes in the Golgi apparatus. See Larocca et al., Mol. Biol. Cell, 15(6):2771-81 (2004). Such structural changes in Golgi apparatus have a role in the pathogenesis of AD, ALS and neurodegeneration caused by aging. Particularly, fragmentation of the Golgi apparatus in motor neurons has been associated with Alzheimer's disease (AD), amyotrophic lateral sclerosis (ALS) and aging. See Steiber et al., Am. J. Pathol., 148(2):355-60 (1996). Defects in the structure of the Golgi apparatus are found in the ballooned neurons commonly found in those diagnosed with AD, dementia, Creutzfeldt-Jakob disease and Pick's disease. See Aoki et al., Acta. Neuropathol. (Berl)., 106(5):436-40 (2003). Thus, SNPs associated with mRNA expression levels are useful to detect or predict susceptibility in an individual to AD, ALS, neurodegeneration caused by aging, dementia, Creutzfeldt-Jakob disease and Pick's disease.

[0147] Irregularities in centromsomes have been linked to cancer development due to their central role in chromosome segregation, irregularities. See Kong et al., Drug News Perspect., 17(3):195-200 (2004). Over-expression of AKAP9 resulted in an increase in the number of centrosomes in Chinese hamster ovary cells. See Nishimura et al., Gene Cells, 10(1):75-86 (2005). Experiments have shown that an increased number of centrosomes can be correlated with tumor progression. Like many known tumor supressors, AKAP9 localized to the centrosomes demonstrating that it likely regulates chromosome duplication and function. See Fisk et al., Curr. Opin. Cell Biol., 14(6):700-5 (2002). The increase in centrosome number in response to AKAP9 expression suggests an association with the risk of developing cancer and with tumor progression. Thus, SNPs associated with AKAP9 mRNA expression are useful as a means of detecting or predicting an individual's susceptibility to cancer and tumor progression.

[0148] Cyclic AMP-dependent kinase signaling abnormalities have been associated with depression and symptoms of depression. See Shelton et al. Int. J. Neuropsychopharmacol. 3:187-192 (1999) reported that reduced PKA in fibroblasts was associated with melancholic major depression. Dwivedi et al. Biol. Psychiatry 56(1):30-40 (2004) reported that PKA levels were altered in the brains of learned helpless rats. Perera et al. CNS Spectrums 6(7):565-572 (2001) discusses the potential roles of PKA in depression and antidepressants. Thus, AKAP9 mediated signaling may be involved in the etiology of depression by modulating PKA signaling.

[0149] One splice variant of AKAP9 has 3,908 amino acids, and there are at least five other different AKAP9 isoforms produced by alternative splicing. An alternative splice variant of AKAP9 consisting of 1,642 residues is found at neuronal and neuromuscular synapses. It specifically interacts with the N-methyl-D-aspartate (NMDA) receptor (NR1) in brain, and may function to attach NR1 to the postsynaptic cytoskeleton. It also binds to PKA and to type I protein phosphatase (PP1), leading to the conclusion that it is an AKAP that functions to bring together NR1 and its regulatory enzymes, thus regulating NR1 channel activity (Lin et al. J. Neuroscience 18:2012-2027 (1998)). Increases in expression levels of NMDA receptor subunits and associated intracellular proteins have been observed in patients with schizophrenia, bipolar disorder and major depression (see, e.g., Nudmamud-Thanoi et al. Neurosci. Lett. 30:173-7 (2004); Clinton et al. Neuropsychopharmacology 29(7):1353-62 (2004); and Heresco-Levy et al. Eur. Neuropsychopharmacol., 8(2):141-52 (1998)). This link between AKAP9 and the depression phenotype demonstrates that SNPs associated with AKAP9 mRNA expression are useful to predict or detect susceptibility to depression in an individual.

[0150] In the cardiac myocyte several AKAP proteins are involved in regulating β1 adrenergic receptor-induced, cAMP-dependent signaling mediated by PKA. Repolarization of the cardiac action potential at the plasma membrane occurs via ion flow through potassium channels during the QT interval of the cardiogram. Voltage-gated potassium channel 1 (KCNQ1) encodes a subunit of the potassium channel required for the delayed rectifier K+ current (Iₖ). This subunit is mutated in heritable forms of the long QT syndrome, a disease characterized by prolonged QT intervals and associated with arrhythmias. The slow component of the Iₖ current (Iₖₛ) is regulated by PKA. The yotiao splice form of AKAP9 has been found complexed to KCNQ1. Regulation of KCNQ1 by PKA and protein phosphatase PP1 requires interaction of KCNQ1 with yotiao through a leucine zipper motif. Congenital long QT syndrome is characterized by ventricular fibrillation with prolonged QT intervals and associated with increased risk of sudden death. One mutation found in patients with long QT syndrome is a single amino acid change in the leucine zipper that serves as interaction surface with yotiao. The mutation abolishes KCNQ1 binding of yotiao and renders the channel insensitive to cAMP signaling. Recent evidence indicates that yotiao not only provides recruitment sites for KCNQ1 regulators, but also serves as a signaling sensor of the phosphorylation state of the channel subunit. See Saucerman et al., Circ Res., 95(12):1216-24 (2004). Thus, SNPs associated with AKAP9 mRNA expression are useful to detect or predict susceptibility to heart disease and associated disorders, especially arrhythmia, long QT syndrome, ventricular fibrillation, cardiac arrest and sudden death.

[0151] DNAJD1 is a member of a highly conserved family of heat shock proteins (“Hsp”) containing four distinct domains including a 70-amino acid residue referred to as the DNAJ domain. This domain is necessary in forming an interaction between DJAJD1 and interacting proteins. See Kelley, W. L., Trends Biochem. Sci., 23:222-227 (1998). Specifically, DNAJD1 is a member of the Hsp40 heat shock protein family, a set of chaperone proteins, which participates in protein folding and regulation of diverse cellular processes including protein transport, cell cycle and stress responses. DNAJD1 functions in concert with Hsp70 family members to assist in protein folding and prevention of protein misfolding. See Hendrick, J. P. and Hartl, F. U., FASEB J., 9, 1559-1569 (1995) and Hartl, F. U., Nature, 381, 571-579 (1996). For example, DNAJD1 and DNAJA2 participate in mitochondrial protein import and DNAJA4 is involved in heat stress response.

[0152] DNAJD1 was cloned by differential display PCR from ovarian epithelial cells and named methylation-controlled J protein, MCJ. Analysis by RT-PCR has shown that two-thirds of primary ovarian tumors have either a complete loss or decreased expression levels of MCJ. See Shridhar et al., Cancer Research, 61:4258-65 (2001). DNA methylation has been shown to inactivate tumor suppressor genes and is increasingly being viewed as a tumor risk marker in non-cancerous tissues. See Malfoy, B., J. Cell Sci., 113(Pt 22):3887-8 (2002) and Muller et al., Ann. N.Y. Acad. Sci., 1022:44-9 (2004). Loss of heterozygosity and PCR studies confirmed that MCJ expression is suppressed by methylation, which can be reduced by methyltransfer inhibitors. These results suggest a role of MCJ as a tumor suppressor. See Starthdee et al., Carcinogenesis, 25(5):693-701 (2004). MCJ overexpression performed through colony-forming assays led to increased sensitivity to the anti-tumor drugs pacilitaxel, topotecan and cisplatin. Moreover, loss of MCJ expression has been correlated with resistance to these types of drugs. See Shridhar et al., Cancer Research, 61:4258-65 (May 2001). As such, SNPs associated with expression levels of DNAJD1 can be used as markers to predict or detect cancer in a patient as well as to predict the effectiveness of anti-tumor agents in the treatment of cancer.

[0153] Ataxin-1 aggregation and astrocyte injury have been implicated in neurodegeneration. See Forman et al., J Neurosci., 25(14):3539-50 (2005) and Cummings et al., Philos. Trans. R. Soc. Lond. B. Biol. Sci., 354(1386):1079-81 (1999). Aggregation of insoluble proteins such as ataxin-1 has been associated with neurodegenerative diseases such as Huntington's disease, Alzheimer's disease, Parkinson's disease, the prion disorders, dentatorubral-pallidoluysian atrophy (DRPLA) and spinocerebellar ataxia type 1 and 3 (SCA1 and SCA3). DNAJD1 overexpression decreased ataxin-1 aggregation in HeLa cells. See Cummings et al., Nat. Genet., 19(2):148-152 (1998). Another potential cause of neurodegenerative disease is astrocyte injury occurring as a result of CNS trauma and ischemia. Astrocytes are glial cells which respond upon injury to the brain. Injury to these cells is associated with neurodegenerative diseases such as Alzheimer's as well as psychiatric disorders such as schizophrenia and depression. Overexpression of DNAJD1 resulted in a significant reduction of astrocyte injury. See Qiao et al., J. Cereb. Blood Flow Metab., 23(10):1113-6. This suggests a potential mechanism by which SNPs associated with DNAJD1 levels are useful as markers to predict or detect patient susceptibility to neurodegenerative disease such as neurodegeneration, Alzheimer's disease, Parkinson's disease, Huntington's disease, prion disorders, DRPLA, SCA1, SCA3, schizophrenia and depression as well as to predict the progression of or ability to recover from such diseases.

[0154] Ischemia results from oxygen deprivation in tissues usually due to lack of blood flow. There is evidence that DNAJD1 may provide protection against injury caused by ischemia such as brain, myocardial and intestinal injury. See Qiao et al., J. Cereb. Blood Flow Metab., 23(10):1113-6. As such, SNPs associated with mRNA levels of DNAJD1 can be useful to predict or detect ischemia and ischemic-type injury, especially cardiomyopathy, coronary disease, coronary artery disease, heart attack, stroke, and intestinal ischemia. They are also useful as a means of prognosis and progression of such injury.

[0155] GOLPH4 is a ubiquitously expressed, type II membrane protein that resides in the cis-Golgi. This human protein contains a short, cytoplasmic tail of twelve amino acids and a large lumenal domain of 664 residues. See Natarajan et al., Mol. Biol. Cell, 15(11): 4798-806 (2004); Linstedt et al., Mol. Biol. Cell, 8(6): 1073-87 (1997). The outer region of the lumenal domain is very acidic because it is enriched in acidic amino acids. See Natarajan et al., Mol. Biol. Cell, 15(11): 4798-806 (2004). The region of GOLPH4 closest to the membrane contains elements that facilitate its pH sensitive targeting. See Natarajan et al., Mol. Biol. Cell, 15(11): 4798-806 (2004); Bachert et al., Mol. Biol. Cell, 12(10):3152-60 (2002). When treated with an agent that prevents acidification, GOLPH4 moves to endosomes. Upon removal of such an agent, GOLPH4 redistributes to the cis-Golgi. See Puri et al., Traffic 3(9):641-53 (2002). GOLPH4 is also known as GPP130 because it is 130-kDa in size. Linstedt et al., Mol. Biol. Cell, 8(6): 1073-87 (1997).

[0156] GOLPH4 seems to play an important role in the movement of proteins and toxins from endosomes to the Golgi via the bypass pathway. Studies on Shigella toxin B subunit trafficking revealed that the bypass pathway bypasses the conventional route, the late endosome/pre-lysosome pathway. The bypass pathway transports proteins or toxins directly from early endosomes to the Golgi and it is branched out of the plasma membrane receptor re-cycling route. Early sorting may be advantageous in that it may reduce the amount of degradation incurred by proteins or toxins that cycle between the Golgi and plasma membrane. In the study, GOLPH4 silencing by RNAi disrupted the normal movement of proteins and toxins. Two proteins dependant on the bypass pathway accumulated in the early/recycling endosomes. Shiga toxin B movement was also inhibited. Yet, proteins known to travel via the late endosome pathway continued to travel to the Golgi. See Natarajan et al., Mol. Biol. Cell, 15(11): 4798-806 (2004).

[0157] Thus, GOLPH4 affects the functionality of a normal retrieval route for proteins and Shiga B toxin to the Golgi. It may also determine the viability of invasion by other toxins, since bacterial and plant toxins are taken up by cells through endocytosis and then exert their effect in the cytoplasm. See Natarajan et al., Mol. Biol. Cell, 15(11): 4798-806 (2004). Polymorphisms that correlate with expression levels of GOLPH4 may be used to predict human susceptibility to diseases that occur as a result of the non-movement of proteins to the Golgi due to low levels or an absence of GOLPH4. Absence of or low levels of expression of GOLPH4 may also predict conditions caused by premature direction of components in the endocytosis pathway towards the endosomal degradation pathway. Finally, polymorphisms that correlate with normal or increased expression levels of GOLPH4 may predict human susceptibility to bacterial toxins.

[0158] RABEP1 is a 100-kD protein that regulates endosome trafficking by providing a tether between transport vesicles and target membranes. The RABEP1 protein interacts with Rab5, a regulator of endocytic vesicle trafficking. As with other Ras protein family members, Rab5 recruits RABEP1 to the early endosome. Trafficking pathways involving RABEP1 include homotypic fusion of endosomes, transport from the trans-Golgi network to the endosome and recycling of membranes from the early endsome to the Golgi. Overexpression of RABEP1 was shown to cause morphological alterations to the early endosome similar to those caused by the overexpression of interacting protein Rab5. Further, immunodepletion of RABEP1 causes a significant decline of early endosome fusion regulated by Rab5. The central role of RABEP1 is to provide a tether between vesicles and target membranes prior to vesicle fusion allowing SNAREs and other membrane and vesicle proteins to establish contact and determine vesicle-target membrane specificity. RABEP1 mediated “docking” of vesicles is a rate-limiting step in vesicle fusion. Trafficking pathways dependent on rabpatin-5 include homotypic fusion of endosomes, transport from the trans-Golgi network (TGN) to the endosome and recycling of membranes from the early endosome to the Golgi complex. See Stenmark et al., Cell, 83(3):423-32 (1995).

[0159] Rabaptin-5 binds both the small GTPase Rab5 as well as the Rab5 GTP exchange factor (GEF) Rabex-5. Rabex-5 promotes the exchange of GDP for GTP on Rab5 thereby catalyzing the formation of active Rab5-GTP on membranes and increasing the affinity of Rab5 for Rabaptin-5. These interactions are thought to promote endosome fusion. See Mattera et al., EMBO, 22(1):78-88 (2003). Inhibition of vesicle production was shown to occur upon depletion of RABEP1/Rabex-5 complex. This further suggests the role of RABEP1 in vesicle recycling. See Pagano et al., Mol. Biol. Cell, 15(11):4990-5000 (2004).

[0160] The N-terminus of Rabaptin-5 contains a binding site for the small GTPase Rab4. The GTPase Rab4 is a marker for early endosomes and regulates recycling of membrane to the Golgi complex. An adjacent GAE binding site interacts with γ1-adaptin, a subunit of the adaptor complex 1 (API). The AP-1 complex mediates transport from the endosome to the Golgi. Adaptor protein complexes are hetero-tetramers that integrate cargo selection with the formation of clathrin-coated vesicles. By binding both Rab4 and γ1-adaptin, Rabaptin-5 regulates endosome-to-Golgi transport. See Deneka et al., EMBO, 22(11):2645-2657 (2003). Defects in endosomal trafficking have been associated with neurodegenerative diseases such as Alzheimer's disease and Niemann-Pick type C disease.

[0161] Specifically, defects in synaptic vesicle recycling such as those associated with RABEP1 may be involved in synapse loss common in Alzheimer's disease. See Yao et al., Neurosci. Lett., 252(1):33-36 (1998). Accumulation and formation of beta-amyloid plaques in brain tissue is a hallmark of Alzheimer's disease pathology. Recently, high levels of RABEP1 interacting protein Rab5 were demonstrated to be highly enriched with beta-amyloid precursor protein APP. See Ikin et al., J. Biol. Chem., 271(50):31783-6 (1996).

[0162] Receptor tyrosine kinases (RTK) are transmembrane proteins that transduce extracellular signals to the cytoplasm and initiate a variety of cell responses through phosphorylation cascades. An extracellular domain receives activating signals through specific ligands inducing receptor multimerization. The intracellular domain of RTKs contains a tyrosine kinase activity which, upon ligand binding, autophosphorylates the receptor dimer. The phosphorylated form of the receptor recruits accessory proteins that propagate the signal through subsequenct phosphorylation/dephosphorylation events resulting in activation of growth-promoting or growth-inhibiting genes. RTK signaling is abrogated by internalization of the receptor through endocytosis.

[0163] Upregulation of RTKs is a frequent event in tumor formation and metastasis. Transforming mutations lead to permanent or increased activation of the receptor by gene fusion events resulting in overexpression, mutations causing ligand-independent activation or mutations activating the kinase domain. Disruptions in receptor endocytosis and recycling are another process that can affect the level of effective receptor activity on the cell surface. Rab5 has been shown to contribute to EGFR recycling and changes in Rab5 expression levels modulate the amount of EGFR present on the cell membrane. See Dinneen et al., Exp. Cell Res., 294(2):509-22 (2004). Expression levels of Rabaptin-5 could equally modify the availability of EGFR and other receptor kinases thereby affecting cancer cell growth and differentiation.

[0164] TAP has an ATP-binding cassette and translocates peptides from the cytosol to the lumen of the endoplasmic reticuclum (ER) where antigen presenting MHC class I molecules bind. ATP is hydrolyzed by TAP to facilitate the peptide transport process. The TAP complex is composed of two polypeptide subunits, TAP1 and TAP2. These proteins are similar in structure, each containing a transmembrane domain and a nucleotide binding domain. See Chen et al., J. Biol. Chem., 279(44):46073-46081 (2004). The TAP2 subunit was shown to form the pore of the TAP complex demonstrating its essential role in mediating peptide loading. TAP2 is also required for recruitment of tapasin polypeptide, another necessary component in TAP-mediated protein translocation. See Koch et al., J. Biol. Chem., 27(11):10142-10147 (2004).

[0165] Surface expression of class I major histocompatibility complex (MHC class I) is critical in the ability of the immune system to recognize and eliminate mutated and infected cells. MHC class I proteins synthesized in the ER are expressed on cell surfaces. Foreign peptides resulting from malignancy (e.g. cancer cells) or viral infection are presented on the MHC class I protein triggering immune response. Viral pathogens have evolved by developing methods of evading immune system detection and response. For example, herpes-simplex virus (HSV) escapes immune recognition through downregulation of MHC class I surface expression. See Lankat-Buttgereit, B. and Tampe, R., Physiol. Rev., 82(1):187-204 (2002). The demonstrated ability of HSV protein ICP47 inhibits the TAP complex thereby preventing production and presentation of MHC class I antigens. See Ahn et al., EMBO J., 15(13):3247-3255 (1996) and Kyritsis et al., J. Biol. Chem., 276(51):48031-9 (2001). Thus, a decline in TAP2 levels leading to decreased MHC class I presentation would result in impaired immune response and increased susceptibility to viral infection in an individual.

[0166] Cancer cells lack the ability to present cell surface antigens. Several cancers, such as melanomas, exhibit of decreased levels of MHC class I surface presenting proteins. See Sherman et al., Crit. Rev. Immunol., 18(1):47-54 (1998). Diminished TAP2 expression levels are present in breast cancer and human non-small cell lung cancer cells. See Alimonti et al., Nature Biotechnol., 18(1):515-520 (2000) and Seliger et al., Immunol. Today, 18(1):292-299 (1997). TAP complex downregulation has also been shown to cause HLA class I antigen loss. See Chen et al., Nat. Genet., 13(1):210-213 (1996). Decreased TAP2 expression would lead to a decline in MHC class I and HLA class I molecules necessary for cancer cell recognition and elimination. Thus, TAP2 expression levels are indicative of cancer cell presence as well as potential to metastasize.

[0167] Occasionally, the immune system attacks endogenous self-proteins which it mistakes as foreign pathogens. This process, known as autoimmunity, can result in diseases such as Wegener's granulomatosis, multiple sclerosis, type 1 diabetes mellitus and rheumatoid arthritis. One example of such an autoimmune response is the recognition and destruction of cells lacking HLA class I proteins by natural killer (NK) cells. Impaired HLA class I expression increases susceptibility to autoimmune disease caused by NK cell mediated cytotoxicity. HLA class I proteins are synthesized from proteins imported into the ER lumen by the TAP complex and show diminished expression in individuals with TAP2 deficiency. See Vitale et al., Blood, 99(5):1723-1729 (2002). Underexpression of TAP2 leads to autoimmunity caused by lack of HLA class I proteins.

[0168] NARG2 is expressed in fetal tissue, but is significantly down-regulated in adults with the most substantial expression levels found in the kidney, testes, liver and brain. Down-regulation of NARG2 was shown to be disrupted in the absence of NMDA receptor in NMDAR1 knockout mice. Intermediate levels of NARG2 were present in NMDAR1+/− mutants. Further, P19 culture cells treated with retinoic acid to induce neuronal differentiation caused a decline in NARG2 expression levels concurrent with increased NMDAR1 expression levels. See Sugiura et al., Eur. J. Biochem., 271(23-24):4629-37 (2004). These studies demonstrate a correlation between NARG2 expression levels and neuronal differentiation, mainly the transition of neuronal precursor cells to neurons.

[0169] The inability of the mammalian CNS to regenerate after damage has been implicated in a number of neurodegenerative diseases such as amyotrophic lateral sclerosis (ALS), Parkinson's disease, Alzheimer's disease and other types of brain and spinal cord injury. See Chen et al., Proc. Natl. Acad. Sci. USA., 101(46):16357-62 (2004). Stimulation by agents that induce neuronal differentiation creates a source of regenerative cells with a therapeutic effect in the treatment of such neurodegenerative diseases. See Richarson et al., Brain Res., 1032(1-2): 11-22 (2005). Thus, the SNPs of the present invention are useful to predict or detect susceptibility to neurodegenerative diseases in an individual as well as to predict progression of these diseases.

[0170] NMDA receptors have been studied extensively. NMDA receptors are known mediate synaptic transmission and neural plasticity in the mammalian central nervous system. (See, Monaghan Annu Rev Pharmacol Toxicol, 29:365-402 (1989); Collingridge Pharmacol Rev, 41:143-210 (1989); McBain Physiol Rev, 74:723-60 (1994)). NMDA receptors are differentially expressed during development (Sheng Nature, 368:144-7 (1994)). NMDA receptors are involved in a variety of fundamental biological processes including brain development by stabilizing converging synapses (Scheetz Faseb J, 8:745-52 (1994)), stimulating cerebellar granule cell migration (Hitoshi et al., Science, 260:95-97 (1993); Farrant Nature, 368:335-9 (1994); Rossi Neuropharmacology, 32:1239-48 (1993)) and development (Burgoyne J Neurocytol, 22:689-95 (1993)), inducing long term depression (Battistin Eur J Neurosci, 6:1750-5 (1994); Komatsu Neuroreport, 4:907-10 (1993); Tsumoto Jpn J. Physiol., 40:573-93 (1990)) and apoptosis (Finiels J Neurochem, 65:1027-34 (1995); Ankarcrona FEBS Lett, 394:321-4 (1996)). NMDA receptors are also known contribute to excitatory cell death in a number of adult pathological conditions (Greenamyre Neurobiol Aging, 10:593-602 (1989); Meldrum Trends Pharmacol Sci, 11, (1990) 379-87; Clark, S, “The NMDA receptor in epilepsy”, 2 edn., Oxford University Press, Oxford, 1994, 395-427 pp.; Doble, A., Therapie, 50:319-37 (1995)).

[0171] Excitatory amino acid receptors, including NMDA receptors, are known to be involved in neurodegenerative diseases, and specific NMDA antagonists are being used in clinical research (Lipton Trends Neurosci, 16:527-32 (1993)) for the potential treatment of stroke, CNS trauma (Faden Trends Pharmacol Sci, 13:29-35 (1992)), epilepsy (Thomas J Am Geriatr Soc, 43:1279-89 (1995); Perucca Pharmacol Res, 28:89-106 (1993)), pain (Elliott Neuropsychopharmacology, 13:347-56 (1995)), Huntington's disease (Purdon J Psychiatry Neurosci, 19:359-67 (1994)), AIDS dementia (Lipton Dev Neurosci, 16:145-51 (1994); Lipton Ann N Y Acad Sci, 747:205-24 (1994)), and Alzheimer's disease (Barry Arch Phys Med Rehabil, 72:1095-101 (1991)) and Parkinson's disease (Ossowska N Neural Transm Park Dis Dement Sect, 8:39-71 (1994)) (Rogawski Trends Pharmacol Sci, 14:325-31 (1993)). In vivo treatment with some of these agents manifest PCP-like psychotomimetic effects. Hence, research has been underway to discover and develop more therapeutically useful and less toxic drugs (Willetts Trends Pharmacol Sci, 11:423-8 (1990)). One less-toxic NMDA antagonist candidate is Ro-01-6794/706 or dextrorphan (Ann N Y Acad Sci, 765 249-61, 298 (1995)). Dextromethorphan and it's metabloite dextrorphan are widely used over the counter as antitussives (Irwin Drugs, 46:80-91 (1993)) which are NMDA channel blockers (Fekany Eur J Pharmacol, 151:151-4 (1988); Choi J Pharmacol Exp Ther, 242:713-20 (1987)) that may be a clinically useful neuroprotectant (Steinberg Neurosci Lett 133:225-8 (1991)). Therapeutically tolerated doses of roughly 30 mg (q.i.d.) orally are used for the over the counter antitussive action, and to 90 mg (q.i.d.) orally for clinical treatment of brain ischemia (Albers Clin. Neuropharmacol., 15:509-14 (1992)). Side effects at high doses of dextromethorphan and dextrorphan included drowsiness, nausea, and decreased coordination. Toxic high doses of dextromethorphan and dextrorphan have been described (Wolfe Am J Emerg Med, 13:174-6 (1995); Hinsberger J Psychiatry Neurosci, 19:375-7 (1994)); Loscher Eur J Pharmacol, 238:191-200 (1993)).

[0172] Numerous potentially clinically useful NMDA antagonists have been studied (Jane “Agonists and competitive antagonists: structure-activity and molecular modeling studies”, 2 edn., Oxford University Press, Oxford, 1994, 31-104 pp; Andaloro Society for Neuroscience Abstracts, 604 (1996); Bigge Biochem Pharmacol, 45:1547-61 (1993); Ornstein, P., “The development of novel competitive N-methyl-D-aspartate antagonists as useful therapeutic agents: Discovery of LY274614 and LY233536”, Raven Press, New York, 1991, 415-423 pp), and some are even orally available, including some derivatives EAB-515 (Li J Med Chem, 38 1955-65 (1995); Lowe Neurochem Int, 25:583-600 (1994)), memantine (Parsons Neuropharmacology, 34:1239-58 (1995); Kornhuber J Neural Transm Suppl, 43:91-104 (1994); Wenk Eur J Pharmacol, 293 267-70 (1995)), and ketamine (Parsons Neuropharmacology, 34:1239-58 (1995); Sagratella Pharmacol Res, 32:1-13 (1995); Porter J Neurochem, 64:614-23 (1995)). Some of these NMDA antagonists are approved for use, several others are in clinical trials for the treatment of neurodegenerative disease, epilepsy, stroke, and other diseases.

[0173] References which disclose other NMDA receptor blockers as well as assays for identifying an agent that acts as such a blocker and toxicity studies for pharmacologic profiles are disclosed in the foregoing and following articles which are all hereby incorporated by reference in their entirety. (See also Jia-He Li, et al., J Med Chem 38:1955-1965 (1995); Steinberg et al., Neurosci Lett, 133:225-8 (1991); Meldrum et al., Trends Pharmacol Sci, 11:379-87 (1990); Willetts et al., Trends Pharmacol Sci, 11:423-8 (1990); Faden et al., Trends Pharmacol Sci, 13:29-35 (1992); Rogawski, Trends Pharmacol Sci, 14:325-31 (1993); Albers et al, Clinical Neuropharm, 15:509-514 (1992); Wolfe et al., Am J Emerg Med, 13:174-6 (1995); Bigge, Biochem Pharmacol, 45:1547-61 (1993)). Examples of known NMDA receptor antagonists include memantine, adamantane, amantadine, an adamantane derivative, dextromethorphan, dextrorphan, dizocilpine, ibogaine, ketamine, remacemide, and phencyclidine. The SNPs in NARG2 useful in predicting NARG2 gene expression can also be used in predicting the gene expression of NMDAR1, because of the inverse correlation between NARG2 expression and NMDAR1 expression.

[0174] RNA helicases of the DEAD box family are present in almost all organisms and function in a variety of RNA metabolism related processes. RNA metabolism involves a dynamic rearrangement of RNA and proteins during transcription, pre-mRNA splicing, translation initiation, RNA transport and RNA degradation. Single-stranded RNA is also prone to form partial intra- and intermolecular interactions, which might interfere with or regulate some of the above processes. DEAD box RNA helicases unwind RNA double strands and dissociate RNA-protein complexes. The ATPase component of the DEAD box motif provides the energy required for unwinding RNA duplexes, rearranging RNA secondary structure or regrouping RNA-protein interactions. See Imaizumi, et al., Biochem. Biophys. Res. Commun., 292(1):274-9 (2002).

[0175] Innate immune response is an organism's first-line defense against pathogens in advance of the subsequent process of adaptive immunity. One essential component of innate immune response are cytokines of the type I interferon family which are induced by bacterial molecules such as lipopolysaccharide (LPS) and CpG DNA, and viral infection. Signaling by pathogen associated molecular patterns (PAMPs) is received by members of the Toll-like receptor (TLRs) family. Extracellular double-stranded RNA, LPS, viral single-stranded RNA and CpG DNA are recognized by TLR3, TLR4, TLR8 and TLR9, respectively. Ligand binding at the extracellular, leucine-rich repeats induces recruitment of adaptor molecules such as MyD88, IRAK, TRAF6 and Trif to the cytoplasmic domain. This initiates a signaling cascade that ends with the activation of transcription factors, among them IRF3 and NFkB, and the activation of a pro-inflammatory transcriptional program. See Yoneyama, et al., Nature Immunology, 5(7):730-737 (2004).

[0176] During infection RNA viruses enter the cell through membrane fusion, delivering their RNA genome in form of a RNP particle to the cytoplasm and bypassing both the extracellular TLR3 as well as TLR3 molecules in the endocytotic pathways. The cytoplasmic sensor for double-stranded RNA is the RNA helicase DDX58, also known as RIG-1. See Li, et al., J. Biol. Chem., 280(17):16739-47 (2005). The protein not only contains a RNA helicase motif, but also two N-terminal death-like domains, which are related to the protein-protein interaction domains DED and CARD. These domains promote homotypic interactions and serve as platforms for the assembly of signaling complexes. It has recently been shown that RIG-1 regulates dsRNA induced signaling and is essential for induction of IRF3 after viral infection. The RNA helicase domain is required for response to viral infection and appears to negatively regulate the CARD domain in the absence of double-stranded RNA. The CARD-like domain of RIG-1 constitutively activates IRF3 and NFkB when expressed in mouse L929 cells. Abrogation of RIG-1 by RNAi impairs activation of IRF3 in response to viral infection and over-expression of RIG-1 reduces viral yield. RIG-1/DDX58 thus is a crucial component of the innate immune response and levels of RIG-1 could predict individual variation in immune response to viruses. See Yoneyama, et al., Nature Immunology, 5(7):730-737 (2004). Overexpression of RIG-1 has also been shown to increase ISGI5 levels resulting in an increase in natural killer cells and cytotoxicity. See Cui, et al., Biochem. Cell Bio., 82(3):401-5 (2004). Furthermore, silencing of RIGI expression impaired response to Sendai virus in hepatocytes. See Li, et al., J. Biochem., 280(17):16739-47 (2005).

[0177] COX2 overexpression has been linked to carcinogenesis and tumorigenesis. Specifically, COX2 expression is sufficient to induce mammary gland tumorigenesis. See Lui, et al., J. Biol. Chem. 276: 18563-18569 (2001). Overexpression of COX2 was also shown to be an early, central event in carcinogenesis in Apc(delta-716) knockout mice. See Oshima, et al., Cell 87: 803-809 (1996). RIGI overexpression lead to increased expression of COX2 mRNA in bladder cancer cells and further induces COX2 activity in endothelial cells. This demonstrates the potential role of RIGI expression levels in the role of cancer development and tumor progression. See Imaizumi, et al., Biochem. Biophys. Res. Commun., 292(1):274-9 (2002).

[0178] Vascular injury, shear stress, hypoxic conditions and inflammatory mediators induce the release of adenosine nucleotides into the local intracellular vasculature. ATP and ADP are also present in extracellular fluid due to plasma membrane permeability and exocytotic vesicles. In blood ATP and ADP regulate platelet aggregation through binding to purinergic P2 receptors on the platelet surface. Free ADP is a potent activator of platelet aggregation, while ATP acts as a competitive antagonist. ATP also acts as an anti-thrombotic through activation of two inhibitors of platelet aggregation, prostacyclin (PGI2) and nitric oxide (NO). Both PGI2 and NO improve blood flow by relaxing smooth muscles and promoting vasodilation as well as inhibiting local effects of ADP on platelet activation. The breakdown product of AMP, adenosine, is also an anti-thrombotic with actions on platelet aggregation that oppose those of ADP. See Burnstock, G., and Williams, M., J. Pharmacol. Exp. Ther., 295(3):862-9 (2000).

[0179] Extracellular ATP and ADP are hydrolyzed by ecto-nucleoside triphosphate diphosphohydrolases (ENTPDases), nucleotide pyrophosphatase/phospho-diesterase I family members and alkaline phosphatases. Members of all three families are present in plasma. The main ecto-nucleosidase in vascular endothelial cells responsible for the hydrolysis of ADP is CD39, which recognizes all forms of nucleoside triphosphates that occur physiologically. It is a transmembrane protein with two TM domains, one located N-terminally and a second one at the C-terminus. This topology creates two intracellular domains at the N- and C-termini and a large extracellular loop located between the TM domains. CD39 appears to be constitutively palmitoylated at Cys13 and this fatty acid modification promotes targeting to calveolae, plasmamembrane regions enriched in signaling molecules including purinergic receptors. According to data from CD39 deficient mice CD39 is the main ecto-nucleosidase at the inner vascular surface. CD39 converts ATP to ADP and qADP to AMP. AMP is catabolized by ecto-5′-nucleotidase to adenosine. By promoting the degradation of ADP to adenosine CD39 is a critical regulatory molecule for maintaining blood flow. See Koziak et al., J. Biol. Chem., 275(3):2057-62 (2000).

[0180] CD39 knockout mice exhibited longer bleeding times and defects in platelet aggregation despite little changes in platelet numbers, plasma ATP or ADP concentrations. Instead disrupted thromboregulation was due to desensitization of purinergic receptors that could be reconstituted by exposure to exogenous ATPDases. CD39−/− endothelial cells failed to abrogate platelet aggregation after stimulation with ADP. Increased susceptibility of CD39 negative mice to vascular injury was suggested by increased deposition of fibrin in most vasculatures, including pulmonary, cardiac, renal, cerebral and splenic. CD39-null mice showed impaired chemotactic response of macrophages and monocytes and absence of new vessel growth. See Mizumoto et al., Nature Medicine, 8(4):358-365 (2002).

[0181] Transgenic expression of CD39 in mice also results in increased bleeding times and disruption of platelet aggregation. However, CD39 transgenic mice are protected against systemic thrombosis when challenged with collagen or ADP. See Enjyoji et al., Nature Medicine, 5(9):1010-1017 (1999). Increased expression of CD39 has also been related to plaque stability and reduced thrombus formation in angina pectoris patients suggesting a role in prevention of acute coronary syndromes. See Hatakeyama et al., Am. J. Cardiol., 95(5):632-5 (2005).

[0182] Acute rejection of allograft transplants has been reduced through the application of immuno-suppressants. A critical feature is inflammatory response that triggers platelet deposition and small vessel thrombosis. CD39 expression levels appear to correlate with rejection risk. Xenografts from CD39 deficient mice had higher rejection rates while grafts from CD39 transgenic mice showed increased survival times. See Imai et al., Mol. Med., 5(11): 743-52 (1999).

[0183] Langerhans cells (LC) are dendritic cells within the epidermis that contribute to T cell stimulation and inflammation by presenting antigens for T cell responses. In CD39 deficient cells ecto-nucleosidase activity is absent in Langerhans cells indicating that ENTPD1 is the main ecto-nucleosidase in LC cells. In CD39−/− mice inflammatory responses to skin irritants were increased. Pro-inflammatory mediators ATP and ADP released by keratinocytes contribute to the activation of T cells, which trigger a second set of ATP dependent signaling events between T cells and dendritic cells. The level of ATP appears to be critical in determining the severity of the response and the expression level of CD39, responsible for ATP hydrolysis, could reflect the inter-individual variability in inflammatory response to irritants and immunogens. See Mizumoto et al., Nature Medicine, 8(4):358-365 (2002).

[0184] FKBP1a is the major binding protein for macrolide immunosuppressant drugs including FK506 and rapamycin. The FK506/FKBP1a complex binds to and inhibits the Ca2+ dependent phosphatase calcineurin. Calcineurin is a central regulator of T cell activation by dephosphorylating the transcription factor NFAT which regulates expression of several cytokines. The rapamycin/FKBP1a complex acts through a different pathway by inhibiting the serine-threonine kinase mTOR resulting in cell cycle arrest in G1 phase. Both actions are the basis for the use of FK506 type immunosuppressants in transplantation surgery. The FKBP gene family has been shown to be associated with antitumor activities. Particularly, FKBP1a gene expression has been shown to have antitumor effects through binding rapamycin, thereby arresting cells in G1. It was also noted that antitumorogenic effects could be related to the stimulation of T cell function by FKBP1a. The cell cycle inhibitory function of the rapamycin/FKBP1a interaction has led to applications of rapamycin as an anti-proliferative agent in cancer therapy. See Fong et al., PNAS, 100(24):14253-14258 (2003).

[0185] FKBP1a expression levels have been shown to increase in the case of nerve damage. Particularly, FKBP1a is upregulated subsequent to nerve crush injury. See Sezen et al., Int. J. Impot. Res., 14(6):506-12 (2002). Regenerating neurons identified by retrograde labelling were found to have upregulated FKBP1a mRNA levels. See Mason et al., Exp. Neurol., 181 (2):181-9 (2003).

[0186] Calcium binding proteins of the penta-EF family (PEF) contain a conserved helix-loop-helix signature that coordinates an Ca⁽²⁺⁾ ion in a pentagonal bipyramidal configuration using the oxygen atoms of an invariant glutamate or aspartate for ligand binding. PEF proteins include sorcin, grancalcin, peflin, calpain and ALG-2. PEF family members contain five repetitive EF-hand motifs, dimerize through unpaired C-terminal EFs and can also form heterodimers. An N-terminal hydrophobic domain promotes Ca⁽²⁺⁾ dependent translocation from a soluble Ca⁽²⁺⁾ free form to a Ca⁽²⁺⁾ bound membrane-attached version. See Hansen, et al., FEBS Lett., 545(2-3_{—}:151-4 (2003) and Farrell, et al., Biol. Res., 37(4):609-12 (2004). Sorcin was originally identified as a gene amplified in drug-resistant cancer cells. Its chromosomal location is close to that of ABCB1 (MDR1), a gene frequently found amplified in response to chemotherapy. Widely expressed in many tissues sorcin co-localizes with NMDA receptors in brain and is found near T-tubules in heart muscle. Several interactors for sorcin have been identified, including annexin VII and presenilin 2, both suggesting a role for sorcin in regulation of calcium homeostasis. See Meyers, et al., J. Biol. Chem., 278(31):28865-71 (2003).

[0187] Best described is its involvement in the regulation of excitation-contraction coupling in the heart muscle. Contraction of the heart muscle depends on coordinated intracellular calcium cycling. It is initiated by the influx of a small Ca⁽²⁺⁾ current through the voltage-activated LTCC channel (L type Ca⁽²⁺⁾ channel) during membrane depolarization. This triggers a much larger release of calcium from the sarcoplasmatic reticulum (SR) through the calcium release channel of the SR, the ryanodine receptor RYR2. Calcium binds to tropomyosin C in the myofilaments stimulating contraction. Dissociation of calcium from tropomyosin begins relaxation and free calcium is returned through efflux pumps like the Ca⁽²⁺⁾ ATPase in the SR and the Na⁺-CA⁽²⁺⁾ exchanger. Each of these transporters is regulated by phosphorylation, either directly or via phosphorylation of accessory proteins. See Marx, et al., Cell, 101(4):365-76 (2000).

[0188] The RYR2 homo-tetramer forms a complex with FKBP12.6, calmodulin, protein kinase A, protein phosphatase 1 and protein phosphatase 2A. Binding of FKBP12.6 stabilizes the closed form of the channel. Hyperphosphorylation of RYR2 as observed in heart failure, results in dissociation of FKBP12.6 from RyR2, destabilization of the closed state and Ca⁽²⁺⁾ leaks during diastole. Since FKBP12.6 promotes coupling between RYR2 receptors, loss of FKBP12.6 also disrupts the simultaneous systolic opening and diastolic closing of RYR2s. Both the reduced Ca⁽²⁺⁾ concentration in the SR and the uncoupling of RYR2 function contribute to cardiac arrhythmia.

[0189] The Ca⁽²⁺⁾ ATPase SERCA2 is regulated by the accessory protein phospholamban (PLN). PLN in its unphosphorylated state inhibits SERCA2 activity. Calcium release via RYR2 activates CAMKII, which phosphorylates PLN and relieves SERCA2 inhibition. This promotes cardiac contractility by recharging the SR calcium stores for the next cycle of release. In failing hearts a chronically activated Gαq-coupled receptor system activates protein kinase C which phosphorylates inhibitor-1, thus abrogating down-regulation of protein phosphatase 1 (PP1). PP1 induced hypophosphorylation of PLN diminishes the activity of SERCA2 and prevents proper calcium recycling. Dysfunction in the calcium cycling process triggers compensatory mechanisms in the heart, including hypertrophy, remodeling and apoptosis. The critical role of calcium in regulating cardiac contractility has made calcium-binding proteins a new interest for drug-based interference in heart failure.

[0190] Sorcin has been found complexed to three different cardiac calcium channels: the LTCC channel, responsible for the initial inward Ca⁽²⁺⁾ current, the RYR2 receptor which controls release of the Ca⁽²⁺⁾ stores from the SR and SERCA2 which actively returns Ca⁽²⁺⁾ to the SR. The calcium bound form of sorcin inhibits receptor activity. Phosphorylation of sorcin by PKA results in loss of receptor inhibition. Transgenic mice over-expressing sorcin in heart muscle cells lack obvious signs of cardiomyopathy, but show defects in cardiac contractility. Sorcin protein preferentially localizes to the Z-lines that contain high concentrations of both the LTCC and RYR2 channels. This co-localization is disrupted in myocytes from a rat model of heart failure. Binding of sorcin to RYR2 decreases specifically the inward Ca⁽²⁺⁾ current triggered activity of RYR2, thereby diminishing the excitation-contraction coupling. Overexpression of sorcin in rat cardiomyocytes also affects the Ca⁽²⁺⁾ uptake and Ca⁽²⁺⁾ load in the sarcoplasmic reticulum, indicating activation of the Ca⁽²⁺⁾ ATPase. This activity is reduced in failing hearts, which show increased PKA dependent phosphorylation of sorcin. Since sorcin is regulated by phosphorylation through the same set of enzymes as several other components of the cardiac calcium cycle (PKA, PP1), it does functionally resemble the two previous described accessory proteins. See Matsumoto, et al., Basic Res. Cardiol., (2005) and Meyers, et al., J. Biol. Chem., 278(31):28865-71 (2003). Consistent with this, sorcin overexpression has been associated with an increase in cardiac contractility and the rescue of abnormal contractile function in the diabetic heart. See Suarez, et al., Am. J. Physiol. Heart Circ. Physiol., 286(1):H68-75 (2004). Recently, Sorcin overexpression was demonstrated to improve cardiac contractility in vivo in transfected rat hearts. See Frank, et al., J. Mol. Cell. Cardiol., 38(4):607-15 (2005). The level of sorcin expression could thus affect susceptibility to heart failure and contribute to variability in response to medication targeting cardiac contractility.

[0191] Sorcin expression levels were measured in leukemic blast cells of patients with acute myloid leukemia (AML). Poor patient prognosis was associated with sorcin overexpression and remission rates were shown to be higher in patients with low sorcin expression than those with higher expression. See Tan, et al., Leuk. Res., 27(2): 125-31 (2003). Sorcin expression has also been shown to have an effect on cell resistance to chemotherapeutics. Specifically, sorcin overexpression via gene transfection in K562 cells resulted in increased resistance to chemotherapeutics including doxorubicin, etoposide, homoharringtonine and vincristine. Sorcin expression was also inhibited in these cells resulting in a reversal of drug resistance. See Zhou, et al., Luek. Res., (2005).

[0192] Exposure to environmental radiation is a normal hazard for all cells and enhanced radiation is used as a major modus of cancer treatment. Genetic factors that modulate sensitivity or resistance to radiation have considerable relevance for the development of diagnostics for susceptibility to cancer and treatment selection in cancer therapy. Irradiation of cells induces multiple cellular responses to radiation stress, including sensing mechanisms for DNA damage, signaling pathways, DNA repair systems and, if necessary, apoptosis. See Snyder, et al., Cancer Metastasis Rev., 23(3-4):259-268 (2004).

[0193] Genome-wide expression profiling has identified sets of genes that are differentially regulated upon exposure to ionizing radiation. As expected they include genes involved in cell cycle progression, cell survival, DNA repair and growth control. XRRA1 was cloned from a human colorectal tumor cell line, HCT116. Several clones of HCT116 with different responses to radiation were isolated. XRRA1 was down-regulated in an untreated cell clone resistant to radiation. The 559aa long protein is highly conserved among vertebrates. It contains several leucine-rich repeats (LLRs), a feature that has been implicated in protein-protein interactions. The repeat pattern observed in this protein is consistent with a motif found in proteins acting as Ran GTPase activating factors (RanGAPs). XRRA1 is expressed in many tissues with higher levels observed in testis, prostate and ovary. The XRRA1 protein was localized both in the nucleus and the cytoplasm.

[0194] The expression pattern of XRRA1 in HCT116 clones in response to irradiation showed differences depending on radiation sensitivity. A resistant clone had lower basal levels, but strongly induced XRRA1 within minutes upon radiation treatment. Levels then decreased slowly. A clone with increased radiation sensitivity had higher basal levels, but failed to induce XRRA1 upon irradiation. Instead levels dropped significantly and only recovered 24 hours post treatment. See Mesak, et al., BMC Genomics, 4(1):32 (2003). This differential pattern suggests that XRRA1 is involved in the response to radiation and levels of XRRA1 may be indicative of resistance and/or sensitivity to radiation.

[0195] IRF5 is a 504 amino acid interferon regulatory factor with a critical role in inducing expression of antiviral proteins in response to viral infection. IFNA is produced by cells in response to viral infection. Defects in IFNA production were found in 30 children with recurrent respiratory infection. See Isaacs et al., Lancet II, 950-952 (1981). Overexpression of IRF5 induces IFNA gene expression, underlining the importance of IRF5 levels in immune system response. Viral infection induces phosphorylation of IRF5 and increases binding to the virus regulatory element. See Barnes et al., J. Biol. Chem., 276(26):23382-90 (2001).

[0196] Toll-like receptors (“TLRs”) can detect most foreign microbes and are thus essential for innate recognition of viral pathogens in mammals. See Beutler, B., Nature, 430(6996):257-63 (2004). Reduced TLR induction was observed in IRF5 deficient mice demonstrating another association of IRF5 with immune response. See Takaoka et al., Nature, 434(7030):243-9 (2005). In view of the above, IRF5 mRNA expression levels are useful to predict and/or detect an individual's susceptibility to viral infection as well as the likelihood of post-infection viral progression.

[0197] AMFR is a receptor for autocrine motility factor, which is a cytokine secreted by tumor cells to promote tumor motility and metastasis. AMFR is a 78-KD cell surface glycoprotein (gp78) that transduces signals from the mitogenic cytokine AMF regulating cell motility in cell based assays and tumor metastasis in vivo. Aside from its seven transmembrane domains, AMFR contains a RING-H2 motif and a leucine zipper. See Shimizu et al., FEBS Lett., 456:295-300 (1999). Over-expression of AMFR induces a transformed phenotype and produces tumor in nude mice. See Onishi et al., Clin. Exp. Metastasis, 20(1):51-58 (2003). Signaling through AMF/AMFR induces vascular endothelial growth factor receptor FLT1 thereby stimulating cell growth through tyrosine phosphorylation pathways. See Funasaka et al., Int. J. Cancer, 101:217-23 (2002). Expression levels of AMFR in melanoma cell lines correlates with their potential to metastasize. See Timar et al., Clin. Exp. Metastasis, 19(3):225-232 (2002). Analysis of primary human skin melanoma tumors identified three types: weak, heterogenous and strong expression. Expression levels appeared to correlate with growth phenotype, strong expression being found in tumors with more pronounced vertical growth indicating a more invasive phenotype. See Timar et al., Clin. Exp. Metastasis, 19(3):225-232 (2002). About 40% of non-small cell lung cancers express AMFR, with expression being associated with type mainly in adenocarcinoma. Survival was significantly worse in patients with AMFR expression. The AMFR expression was also associated with VEGF expression, both indicating worse prognosis. See Kara et al., Ann. Thorac. Surg., 71:944-8 (2001). Approx. 30% of thymomas showed expression of AMFR, again expression being associated with worse outcome. See Ohta et al., Int. J. Oncol., 17:259-64 (2000). Since the SNPs and haplotypes described here are associated with the expression level of AMFR, they can be used to predict cancer susceptibility and prognosis in patients. They may also be useful in predicting patients' response to treatment with VEGF-targeting drugs.

### 3. Isolated Nucleic Acids

[0198] Accordingly, the present invention provides an isolated TLK1 nucleic acid containing at least one of the newly discovered nucleotide variants as summarized in Tables 1, 2 and 3. The term “TLK1 nucleic acid” is as defined above and means a naturally existing nucleic acid coding for a wild-type or variant or mutant TLK1. The term “TLK1 nucleic acid” is inclusive and may be in the form of either double-stranded or single-stranded nucleic acids, and a single strand can be either of the two complementing strands. The isolated TLK1 nucleic acid can be naturally existing genomic DNA, mRNA or cDNA. Sequences of several naturally existing TLK1 cDNAs and proteins are provided in SEQ ID NOs: 1, 2 and 14-17.

[0199] In yet another embodiment, the isolated TLK1 nucleic acid has a nucleotide sequence encoding TLK1 protein having an amino acid sequence according to SEQ ID NO:2 but contains one or more amino acid variants of Tables 1-3 (e.g., EX11@51G>A). Isolated TLK1 nucleic acids having a nucleotide sequence that is the complement of the sequence are also encompassed by the present invention.

[0200] In yet another embodiment, the isolated TLK1 nucleic acid has a nucleotide sequence encoding a TLK1 protein having an amino acid sequence that is at least 95%, preferably at least 97% and more preferably at least 99% identical to SEQ ID NO:2 but contains one or more amino acid variants of Tables 1-3 (e.g., EX11@51G>A), or the complement thereof.

[0201] In another embodiment, the present invention provides an isolated nucleic acid, naturally occurring or artificial, having a nucleotide sequence encoding a TLK1 protein having an amino acid sequence according to SEQ ID NO:2 but containing one or more amino acid variants of Tables 1-3 (e.g., EX11@51G>A). Isolated nucleic acids having a nucleotide sequence that is the complement of the sequence are also encompassed by the present invention.

[0202] In addition, isolated nucleic acids are also provided which have a nucleotide sequence encoding a protein having an amino acid sequence that is at least 95%, preferably at least 97% and more preferably at least 99% identical to SEQ ID NO:2 but containing one or more amino acid variants of Tables 1-3 (e.g., EX11@51G>A), or the complement thereof.

[0203] Also encompassed are isolated TLK1 nucleic acids obtainable by:

(a) providing a human genomic library;

(b) screening the genomic library using a probe having a nucleotide sequence according to any one of SEQ ID NOs: 1, 3-10; and

[0204] (c) producing a genomic DNA comprising a contiguous span of at least 30 nucleotides of any one of SEQ ID NOs:1, 3-10, wherein the genomic DNA thus produced contains one or more of the SNPs of the present invention in Tables 1-3, such as EX7@+63A, EX7@+190C, EX11@51A and EX25@855G.

[0205] The present invention also includes isolated TLK1 nucleic acids obtainable by:

(i) providing a cDNA library using human mRNA from a human tissue, e.g., blood;

(ii) screening the cDNA library using a probe having a nucleotide sequence according to any one of SEQ ID NOs: 1, 3-10; and

[0206] (iii) producing a cDNA DNA comprising a contiguous span of at least 30 nucleotides of any one of SEQ ID NOs:1, 3-10, wherein the cDNA thus produced contains one or more of the SNPs of the present invention in Tables 1-3, such as EX7@+63A, EX7@+190C, EX11@51A and EX25@855G.

[0207] The present invention also encompasses an isolated nucleic acid comprising the nucleotide sequence of a region of a TLK1 genomic DNA or cDNA or mRNA, wherein the region contains one or more nucleotide variants as provided in Tables 1-3 (e.g., EX7@+63A, EX7@+190C, EX11@51A and EX25@855G), or one or more nucleotide variants that will give rise to one or more amino acid variants of Table 2, or the complement thereof. Such regions can be isolated and analyzed to efficiently detect the nucleotide variants of the present invention. Also, such regions can also be isolated and used as probes or primers in detection of the nucleotide variants of the present invention and other uses as will be clear from the descriptions below.

[0208] Thus, in one embodiment, the isolated nucleic acid comprises a contiguous span of at least 12, 15, 17, 18, 19, 20, 21, 22, 23, 24, 25, 26, 27, 28, 29, 30, 40, 50, 70 or 100 nucleotide residues of a TLK1 nucleic acid, the contiguous span containing one or more nucleotide variants of Tables 1-3 (e.g., EX7@+63A, EX7@+190C, EX11@51A and EX25@855G), or the complement thereof. In specific embodiments, the isolated nucleic acid are oligonucleotides having a contiguous span of from about 17, 18, 19, 20, 21, 22, 23 or 25 to about 30, 40 or 50, preferably from about 21 to about 30 nucleotide residues, of any TLK1 nucleic acid, said contiguous span containing one or more nucleotide variants of Tables 1-3 (e.g., EX7@+63A, EX7@+190C, EX11@51A and EX25@855G).

[0209] In one embodiment, the isolated nucleic acid comprises a contiguous span of at least 12, 15, 17, 18, 19, 20, 21, 22, 23, 24, 25, 26, 27, 28, 29, 30, 40, 50, 70 or 100 nucleotide residues of any one of SEQ ID NOs:3-10, containing one or more nucleotide variants of Tables 1-3 (e.g., EX7@+63A, EX7@+190C, EX11@51A and EX25@855G), or the complement thereof. In specific embodiments, the isolated nucleic acid comprises a nucleotide sequence according to any one of SEQ ID NOs:3-10. In preferred embodiments, the isolated nucleic acid are oligonucleotides having a contiguous span of from about 17, 18, 19, 20, 21, 22, 23 or 25 to about 30, 40 or 50, preferably from about 21 to about 30 nucleotide residues, of any one of SEQ ID NOs: 3-10 and containing one or more nucleotide variants of Tables 1-3 (e.g., EX7@+63A, EX7@+190C, EX11@51A and EX25@855G). The complements of the isolated nucleic acids are also encompassed by the present invention.

[0210] Thus, for example, an isolated nucleic acid of the present invention can have a contiguous span of at least 18, 19, 20, 21, 22, 23, 24, 25, 26, 27, 28, 29, or 30 or 40 or 50 nucleotide residues of SEQ ID NO:3 containing the nucleotide variant EX7@+63A (nucleotide residue No. 51 in SEQ ID NO:3), or a contiguous span of at least 18, 19, 20, 21, 22, 23, 24, 25, 26, 27, 28, 29, or 30 or 40 or 50 nucleotide residues of SEQ ID NO:4 containing the nucleotide variant EX7@+190C (nucleotide residue No. 51 in SEQ ID NO:4), or a contiguous span of at least 18, 19, 20, 21, 22, 23, 24, 25, 26, 27, 28, 29, or 30 or 40 or 50 nucleotide residues of SEQ ID NO:5 containing the nucleotide variant EX11@51A (nucleotide residue No. 51 in SEQ ID NO:5), or a contiguous span of at least 18, 19, 20, 21, 22, 23, 24, 25, 26, 27, 28, 29, or 30 or 40 or 50 nucleotide residues of SEQ ID NO:6 containing the nucleotide variant EX25@855G (nucleotide residue Nos. 51 in SEQ ID NO:6), or the complements thereof.

[0211] The present invention further provides an isolated WARS2 nucleic acid containing at least one of the newly discovered nucleotide variants as summarized in Table 4, e.g., EX1@−963G, EX1@−103T, EX6@780G, EX6@842T and EX6@2152G. The term “WARS2 nucleic acid” is as defined above and means a naturally existing nucleic acid coding for a wild-type or variant or mutant WARS2. The term “WARS2 nucleic acid” is inclusive and may be in the form of either double-stranded or single-stranded nucleic acids, and a single strand can be either of the two complementing strands. The isolated WARS2 nucleic acid can be naturally existing genomic DNA, mRNA or cDNA. In one embodiment, the isolated WARS2 nucleic acid has a nucleotide sequence encoding WARS2 protein having an amino acid sequence according to SEQ ID NO:19 but contains one or more amino acid variants. Isolated WARS2 nucleic acids having a nucleotide sequence that is the complement of the sequence are also encompassed by the present invention.

[0212] In yet another embodiment, the isolated WARS2 nucleic acid has a nucleotide sequence encoding a WARS2 protein having an amino acid sequence that is at least 95%, preferably at least 97% and more preferably at least 99% identical to SEQ ID NO:19 but contains one or more amino acid variants, or the complement thereof.

[0213] The present invention also provides an isolated nucleic acid, naturally occurring or artificial, having a nucleotide sequence that is at least 95%, preferably at least 97% and more preferably at least 99% identical to SEQ ID NO:18 except for containing one or more nucleotide variants of Table 4 (e.g., EX1@−963G, EX1@−103T, EX6@780G, EX6@842T and EX6@2152G), or the complement thereof.

[0214] In another embodiment, the present invention provides an isolated nucleic acid, naturally occurring or artificial, having a nucleotide sequence encoding a WARS2 protein having an amino acid sequence according to SEQ ID NO:19 but containing one or more amino acid variants. Isolated nucleic acids having a nucleotide sequence that is the complement of the sequence are also encompassed by the present invention.

[0215] In addition, isolated nucleic acids are also provided which have a nucleotide sequence encoding a protein having an amino acid sequence that is at least 95%, preferably at least 97% and more preferably at least 99% identical to SEQ ID NO:19 but containing one or more amino acid variants, or the complement thereof.

[0216] Also encompassed are isolated WARS2 nucleic acids obtainable by:

(a) providing a human genomic library;

(b) screening the genomic library using a probe having a nucleotide sequence according to any one of SEQ ID NOs:18, 20, 22-26; and

[0217] (c) producing a genomic DNA comprising a contiguous span of at least 30 nucleotides of any one of SEQ ID NOs:18, 20, 22-26, wherein the genomic DNA thus produced contains one or more of the SNPs of the present invention in Table 4, such as EX1@−963G, EX1@−103T, EX6@780G, EX6@842T and EX6@2152G.

[0218] The present invention also includes isolated WARS2 nucleic acids obtainable by:

(i) providing a cDNA library using human mRNA from a human tissue, e.g., blood;

(ii) screening the cDNA library using a probe having a nucleotide sequence according to any one of SEQ ID NOs: 18, 20, 22-26; and

[0219] (iii) producing a cDNA DNA comprising a contiguous span of at least 30 nucleotides of any one of SEQ ID NOs: 18, 20, 22-26, wherein the cDNA thus produced contains one or more of the SNPs of the present invention in Table 4, such as EX1@−963G, EX1@−103T, EX6@780G, EX6@842T and EX6@2152G.

[0220] The present invention also encompasses an isolated nucleic acid comprising the nucleotide sequence of a region of a WARS2 genomic DNA or cDNA or mRNA, wherein the region contains one or more nucleotide variants as provided in 4 (e.g., EX1@−963G, EX1@−103T, EX6@780G, EX6@842T and EX6@2152G), or one or more nucleotide variants that will give rise to one or more amino acid variants, or the complement thereof. Such regions can be isolated and analyzed to efficiently detect the nucleotide variants of the present invention. Also, such regions can also be isolated and used as probes or primers in detection of the nucleotide variants of the present invention and other uses as will be clear from the descriptions below.

[0221] Thus, in one embodiment, the isolated nucleic acid comprises a contiguous span of at least 12, 15, 17, 18, 19, 20, 21, 22, 23, 24, 25, 26, 27, 28, 29, 30, 40, 50, 70 or 100 nucleotide residues of a WARS2 nucleic acid, the contiguous span containing one or more nucleotide variants of Table 4 (e.g., EX1@−963G, EX1@−103T, EX6@780G, EX6@842T and EX6@2152G), or the complement thereof. In specific embodiments, the isolated nucleic acid are oligonucleotides having a contiguous span of from about 17, 18, 19, 20, 21, 22, 23 or 25 to about 30, 40 or 50, preferably from about 21 to about 30 nucleotide residues, of any WARS2 nucleic acid, said contiguous span containing one or more nucleotide variants of Table 4 (e.g., EX1@−963G, EX1@−103T, EX6@780G, EX6@842T and EX6@2152G).

[0222] In one embodiment, the isolated nucleic acid comprises a contiguous span of at least 12, 15, 17, 18, 19, 20, 21, 22, 23, 24, 25, 26, 27, 28, 29, 30, 40, 50, 70 or 100 nucleotide residues of any one of SEQ ID NOs:22-29, containing one or more nucleotide variants of Table 4 (e.g., EX1@−963G, EX1@−103T, EX6@780G, EX6@842T and EX6@2152G), or the complement thereof. In specific embodiments, the isolated nucleic acid comprises a nucleotide sequence according to any one of SEQ ID NOs: 22-29. In preferred embodiments, the isolated nucleic acid are oligonucleotides having a contiguous span of from about 17, 18, 19, 20, 21, 22, 23 or 25 to about 30, 40 or 50, preferably from about 21 to about 30 nucleotide residues, of any one of SEQ ID NOs: 22-29 and containing one or more nucleotide variants of Table 4 (e.g., EX1@−963G, EX1@−103T, EX6@780G, EX6@842T and EX6@2152G). The complements of the isolated nucleic acids are also encompassed by the present invention.

[0223] Thus, for example, an isolated nucleic acid of the present invention can have a contiguous span of at least 18, 19, 20, 21, 22, 23, 24, 25, 26, 27, 28, 29, or 30 or 40 or 50 nucleotide residues of SEQ ID NO:22 containing the nucleotide variant EX1@−963G (nucleotide residue No. 51 in SEQ ID NO:22), or a contiguous span of at least 18, 19, 20, 21, 22, 23, 24, 25, 26, 27, 28, 29, or 30 or 40 or 50 nucleotide residues of SEQ ID NO:23 containing the nucleotide variant EX1@−103T (nucleotide residue No. 51 in SEQ ID NO: 23), or a contiguous span of at least 18, 19, 20, 21, 22, 23, 24, 25, 26, 27, 28, 29, or 30 or 40 or 50 nucleotide residues of SEQ ID NO:24 containing the nucleotide variant EX6@780G (nucleotide residue No. 51 in SEQ ID NO:24), or a contiguous span of at least 18, 19, 20, 21, 22, 23, 24, 25, 26, 27, 28, 29, or 30 or 40 or 50 nucleotide residues of SEQ ID NO:25 containing the nucleotide variant EX6@842T (nucleotide residue Nos. 51 in SEQ ID NO:25), or a contiguous span of at least 18, 19, 20, 21, 22, 23, 24, 25, 26, 27, 28, 29, or 30 or 40 or 50 nucleotide residues of SEQ ID NO:26 containing the nucleotide variant EX6@2152G (nucleotide residue Nos. 51 in SEQ ID NO:26), or the complements thereof.

[0224] The present invention further provides an isolated ARTS1 nucleic acid containing at least one of the newly discovered nucleotide variants as summarized in Tables 5-10, or one or more nucleotide variants that will result in the amino acid variants provided in Tables 5-11, e.g., EX1@−1125T, EX2@397C, EX20@1085G, EX15@74A, EX19@885T, EX20@2105C, EX20@719C and EX20@1038A. The term “ARTS1 nucleic acid” is as defined above and means a naturally existing nucleic acid coding for a wild-type or variant or mutant ARTS1. The term “ARTS1 nucleic acid” is inclusive and may be in the form of either double-stranded or single-stranded nucleic acids, and a single strand can be either of the two complementing strands. The isolated ARTS1 nucleic acid can be naturally existing genomic DNA, mRNA or cDNA. In one embodiment, the isolated ARTS1 nucleic acid has a nucleotide sequence according to SEQ ID NO:30 but containing one or more exonic nucleotide variants of Tables 5-11 (e.g., EX2@397C and EX15@74A), or the complement thereof.

[0225] In another embodiment, the isolated ARTS1 nucleic acid has a nucleotide sequence that is at least 95%, preferably at least 97% and more preferably at least 99% identical to SEQ ID NO:30 but contains one or more exonic nucleotide variants of Tables 5-11 (e.g., EX2@397C and EX15@74A), or one or more nucleotide variants that will result in one or more amino acid variants of Tables 5-11, or the complement thereof.

[0226] In yet another embodiment, the isolated ARTS1 nucleic acid has a nucleotide sequence encoding ARTS1 protein having an amino acid sequence according to SEQ ID NO:31 but contains one or more amino acid variants of Tables 5-11 (e.g., EX2@397C and EX15@74A). Isolated ARTS1 nucleic acids having a nucleotide sequence that is the complement of the sequence are also encompassed by the present invention.

[0227] In yet another embodiment, the isolated ARTS1 nucleic acid has a nucleotide sequence encoding a ARTS1 protein having an amino acid sequence that is at least 95%, preferably at least 97% and more preferably at least 99% identical to SEQ ID NO:31 but contains one or more amino acid variants of Tables 5-11 (e.g., EX2@397C and EX15@74A), or the complement thereof.

[0228] The present invention also provides an isolated nucleic acid, naturally occurring or artificial, having a nucleotide sequence that is at least 95%, preferably at least 97% and more preferably at least 99% identical to SEQ ID NO:30 except for containing one or more nucleotide variants of Tables 5-11 (e.g., EX2@397C and EX15@74A), or the complement thereof.

[0229] In another embodiment, the present invention provides an isolated nucleic acid, naturally occurring or artificial, having a nucleotide sequence encoding a ARTS1 protein having an amino acid sequence according to SEQ ID NO:31 but containing one or more amino acid variants of Tables 5-11 (e.g., EX2@397C and EX15@74A). Isolated nucleic acids having a nucleotide sequence that is the complement of the sequence are also encompassed by the present invention.

[0230] In addition, isolated nucleic acids are also provided which have a nucleotide sequence encoding a protein having an amino acid sequence that is at least 95%, preferably at least 97% and more preferably at least 99% identical to SEQ ID NO:31 but containing one or more amino acid variants of Tables 5-11 (e.g., EX2@397C and EX15@74A), or the complement thereof.

[0231] Also encompassed are isolated ARTS1 nucleic acids obtainable by:

(a) providing a human genomic library;

(b) screening the genomic library using a probe having a nucleotide sequence according to any one of SEQ ID NOs:30, 32, 34-35;

[0232] (c) producing a genomic DNA comprising a contiguous span of at least 30 nucleotides of any one of SEQ ID NOs: 30, 32, 34-35, wherein the genomic DNA thus produced contains one or more of the SNPs of the present invention in Tables 5-11, such as EX1@−1125T, EX2@397C, EX20@1085G, EX15@74A, EX19@885T, EX20@2105C, EX20@719C and EX20@1038A.

[0233] The present invention also includes isolated ARTS1 nucleic acids obtainable by:

(i) providing a cDNA library using human mRNA from a human tissue, e.g., blood;

(ii) screening the cDNA library using a probe having a nucleotide sequence according to any one of SEQ ID Nos: 30, 32, 34-35; and

[0234] (iii) producing a cDNA DNA comprising a contiguous span of at least 30 nucleotides of any one of SEQ ID NOs: 30, 32, 34-35, wherein the cDNA thus produced contains one or more of the SNPs of the present invention in Tables 5-11, such as EX2@397C and EX15@74A.

[0235] The present invention also encompasses an isolated nucleic acid comprising the nucleotide sequence of a region of a ARTS1 genomic DNA or cDNA or mRNA, wherein the region contains one or more nucleotide variants as provided in Tables 5-11 (e.g., EX1@−1125T, EX2@397C, EX20@1085G, EX15@74A, EX19@885T, EX20@2105C, EX20@719C and EX20@1038A), or one or more nucleotide variants that will give rise to one or more amino acid variants of Tables 5-11, or the complement thereof. Such regions can be isolated and analyzed to efficiently detect the nucleotide variants of the present invention. Also, such regions can also be isolated and used as probes or primers in detection of the nucleotide variants of the present invention and other uses as will be clear from the descriptions below.

[0236] Thus, in one embodiment, the isolated nucleic acid comprises a contiguous span of at least 12, 15, 17, 18, 19, 20, 21, 22, 23, 24, 25, 26, 27, 28, 29, 30, 40, 50, 70 or 100 nucleotide residues of a ARTS1 nucleic acid, the contiguous span containing one or more nucleotide variants of Tables 5-11 (e.g., EX1@−1125T, EX2@397C, EX20@1085G, EX15@74A, EX19@885T, EX20@2105C, EX20@719C and EX20@1038A), or the complement thereof. In specific embodiments, the isolated nucleic acid are oligonucleotides having a contiguous span of from about 17, 18, 19, 20, 21, 22, 23 or 25 to about 30, 40 or 50, preferably from about 21 to about 30 nucleotide residues, of any ARTS1 nucleic acid, said contiguous span containing one or more nucleotide variants of Tables 5-11 (e.g., EX1@−1125T, EX2@397C, EX20@1085G, EX15@74A, EX19@885T, EX20@2105C, EX20@719C and EX20@1038A).

[0237] In one embodiment, the isolated nucleic acid comprises a contiguous span of at least 12, 15, 17, 18, 19, 20, 21, 22, 23, 24, 25, 26, 27, 28, 29, 30, 40, 50, 70 or 100 nucleotide residues of any one of SEQ ID NOs: 26, 28, 30-51, containing one or more nucleotide variants of Tables 5-11 (e.g., EX1@−1125T, EX2@397C, EX20@1085G, EX15@74A, EX19@885T, EX20@2105C, EX20@719C and EX20@1038A), or the complement thereof. In specific embodiments, the isolated nucleic acid comprises a nucleotide sequence according to any one of SEQ ID NOs: 30, 32, 34-35. In preferred embodiments, the isolated nucleic acid are oligonucleotides having a contiguous span of from about 17, 18, 19, 20, 21, 22, 23 or 25 to about 30, 40 or 50, preferably from about 21 to about 30 nucleotide residues, of any one of SEQ ID NOs: 30, 32, 34-35 and containing one or more nucleotide variants of Tables 5-11 (e.g., EX1@−1125T, EX2@397C, EX20@1085G, EX15@74A, EX19@885T, EX20@2105C, EX20@719C and EX20@1038A). The complements of the isolated nucleic acids are also encompassed by the present invention.

[0238] Thus, for example, an isolated nucleic acid of the present invention can have a contiguous span of at least 18, 19, 20, 21, 22, 23, 24, 25, 26, 27, 28, 29, or 30 or 40 or 50 nucleotide residues of SEQ IUD NO:34 containing the nucleotide variant EX1@−1125T (nucleotide residue No. 51 in SEQ ID NO:34), or a contiguous span of at least 18, 19, 20, 21, 22, 23, 24, 25, 26, 27, 28, 29, or 30 or 40 or 50 nucleotide residues of SEQ ID NO:35 containing the nucleotide variant EX2@397C (nucleotide residue No. 51 in SEQ ID NO:35), or a contiguous span of at least 18, 19, 20, 21, 22, 23, 24, 25, 26, 27, 28, 29, or 30 or 40 or 50 nucleotide residues of SEQ ID NO:52 containing the nucleotide variant, EX20@1085G (nucleotide residue No. 51 in SEQ ID NO:52), or a contiguous span of at least 18, 19, 20, 21, 22, 23, 24, 25, 26, 27, 28, 29, or 30 or 40 or 50 nucleotide residues of SEQ ID NO:45 containing the nucleotide variant EX15@74A (nucleotide residue Nos. 51, 52 and 53 in SEQ ID NO:45), or a contiguous span of at least 18, 19, 20, 21, 22, 23, 24, 25, 26, 27, 28, 29, or 30 or 40 or 50 nucleotide residues of SEQ ID NO:49 containing the nucleotide variant EX19@885T (nucleotide residue No. 51 in SEQ ID NO:49), or a contiguous span of at least 18, 19, 20, 21, 22, 23, 24, 25, 26, 27, 28, 29, or 30 or 40 or 50 nucleotide residues of SEQ ID NO:53 containing the nucleotide variant EX20@2105C (nucleotide residue No. 51 in SEQ ID NO:53), or a contiguous span of at least 18, 19, 20, 21, 22, 23, 24, 25, 26, 27, 28, 29, or 30 or 40 or 50 nucleotide residues of SEQ ID NO:50 containing the nucleotide variant EX20@719C (nucleotide residue No. 51 in SEQ ID NO:50), or a contiguous span of at least 18, 19, 20, 21, 22, 23, 24, 25, 26, 27, 28, 29, or 30 or 40 or 50 nucleotide residues of SEQ ID NO:51 containing the nucleotide variant EX20@1038A (nucleotide residue No. 51 in SEQ ID NO:51), or the complements thereof.

[0239] The present invention further provides an isolated MSR nucleic acid containing at least one of the newly discovered nucleotide variants as summarized in Table 12, or one or more nucleotide variants that will result in the amino acid variants provided in Table 12, e.g., EX1@−674G, EX1@19C, EX1@+129m, EX5@123T, EX10@+83G, EX11@+54C and EX14@14T. The term “MSR nucleic acid” is as defined above and means a naturally existing nucleic acid coding for a wild-type or variant or mutant MSR. The term “MSR nucleic acid” is inclusive and may be in the form of either double-stranded or single-stranded nucleic acids, and a single strand can be either of the two complementing strands. The isolated MSR nucleic acid can be naturally existing genomic DNA, mRNA or cDNA. In one embodiment, the isolated MSR nucleic acid has a nucleotide sequence according to SEQ ID NO:66 but containing one or more exonic nucleotide variants of Table 12 (e.g., EX5@123T and EX14@14T), or the complement thereof.

[0240] In another embodiment, the isolated MSR nucleic acid has a nucleotide sequence that is at least 95%, preferably at least 97% and more preferably at least 99% identical to SEQ ID NO:64 but contains one or more exonic nucleotide variants of Table 12 (e.g., EX5@123T and EX14@14T), or one or more nucleotide variants that will result in one or more amino acid variants of Table 12, or the complement thereof.

[0241] In yet another embodiment, the isolated MSR nucleic acid has a nucleotide sequence encoding MSR protein having an amino acid sequence according to SEQ ID NO:67 but contains one or more amino acid variants of Table 12 (e.g., EX14@14T). Isolated MSR nucleic acids having a nucleotide sequence that is the complement of the sequence are also encompassed by the present invention.

[0242] In yet another embodiment, the isolated MSR nucleic acid has a nucleotide sequence encoding a MSR protein having an amino acid sequence that is at least 95%, preferably at least 97% and more preferably at least 99% identical to SEQ ID NO:65 but contains one or more amino acid variants of Table 12 (e.g., EX14@14T), or the complement thereof.

[0243] The present invention also provides an isolated nucleic acid, naturally occurring or artificial, having a nucleotide sequence that is at least 95%, preferably at least 97% and more preferably at least 99% identical to SEQ ID NO:66 except for containing one or more nucleotide variants of Table 12 (e.g., EX5@123T and EX14@14T), or the complement thereof.

[0244] In another embodiment, the present invention provides an isolated nucleic acid, naturally occurring or artificial, having a nucleotide sequence encoding a MSR protein having an amino acid sequence according to SEQ ID NO:67 but containing one or more amino acid variants of Table 12 (e.g., EX14@14T). Isolated nucleic acids having a nucleotide sequence that is the complement of the sequence are also encompassed by the present invention.

[0245] In addition, isolated nucleic acids are also provided which have a nucleotide sequence encoding a protein having an amino acid sequence that is at least 95%, preferably at least 97% and more preferably at least 99% identical to SEQ ID NO:67 but containing one or more amino acid variants of Table 12 (e.g., EX14@14T), or the complement thereof.

[0246] Also encompassed are isolated MSR nucleic acids obtainable by:

(a) providing a human genomic library;

(b) screening the genomic library using a probe having a nucleotide sequence according to any one of SEQ ID NOs:66, 68, 70-81; and

[0247] (c) producing a genomic DNA comprising a contiguous span of at least 30 nucleotides of any one of SEQ ID NOs: 66, 68, 70-81, wherein the genomic DNA thus produced contains one or more of the SNPs of the present invention in Table 12, such as EX1@−674G, EX1@19C, EX1@+129m, EX5@123T, EX10@+83G, EX11@+54C and EX14@14T.

[0248] The present invention also includes isolated MSR nucleic acids obtainable by:

(i) providing a cDNA library using human mRNA from a human tissue, e.g., blood;

(ii) screening the cDNA library using a probe having a nucleotide sequence according to any one of SEQ ID NOs: 66, 68, 70-81; and

[0249] (iii) producing a cDNA DNA comprising a contiguous span of at least 30 nucleotides of any one of SEQ ID NOs: 66, 68, 70-81, wherein the cDNA thus produced contains one or more of the SNPs of the present invention in Table 12, such as EX5@123T and EX14@14T.

[0250] The present invention also encompasses an isolated nucleic acid comprising the nucleotide sequence of a region of a MSR genomic DNA or cDNA or mRNA, wherein the region contains one or more nucleotide variants as provided in Table 12 (e.g., EX1@−674G, EX1@19C, EX1@+129m, EX5@123T, EX10@+83G, EX11@+54C and EX14@14T), or one or more nucleotide variants that will give rise to one or more amino acid variants of Table 12, or the complement thereof. Such regions can be isolated and analyzed to efficiently detect the nucleotide variants of the present invention. Also, such regions can also be isolated and used as probes or primers in detection of the nucleotide variants of the present invention and other uses as will be clear from the descriptions below.

[0251] Thus, in one embodiment, the isolated nucleic acid comprises a contiguous span of at least 12, 15, 17, 18, 19, 20, 21, 22, 23, 24, 25, 26, 27, 28, 29, 30, 40, 50, 70 or 100 nucleotide residues of a MSR nucleic acid, the contiguous span containing one or more nucleotide variants of Table 12 (e.g., EX1@−674G, EX1@19C, EX1@+129m, EX5@123T, EX10@+83G, EX11@+54C and EX14@14T), or the complement thereof. In specific embodiments, the isolated nucleic acid are oligonucleotides having a contiguous span of from about 17, 18, 19, 20, 21, 22, 23 or 25 to about 30, 40 or 50, preferably from about 21 to about 30 nucleotide residues, of any MSR nucleic acid, said contiguous span containing one or more nucleotide variants of Table 12 (e.g., EX1@−674G, EX1@19C, EX1@+129m, EX5@123T, EX10@+83G, EX11@+54C and EX14@14T).

[0252] In one embodiment, the isolated nucleic acid comprises a contiguous span of at least 12, 15, 17, 18, 19, 20, 21, 22, 23, 24, 25, 26, 27, 28, 29, 30, 40, 50, 70 or 100 nucleotide residues of any one of SEQ ID NOs:70-81, containing one or more nucleotide variants of Table 12 (e.g., EX1@−674G, EX1@19C, EX1@+129m, EX5@123T, EX10@+83G, EX11@+54C and EX14@14T), or the complement thereof. In specific embodiments, the isolated nucleic acid comprises a nucleotide sequence according to any one of SEQ ID NOs:70-81. In preferred embodiments, the isolated nucleic acid are oligonucleotides having a contiguous span of from about 17, 18, 19, 20, 21, 22, 23 or 25 to about 30, 40 or 50, preferably from about 21 to about 30 nucleotide residues, of any one of SEQ ID NOs:70-81 and containing one or more nucleotide variants of Table 12 (e.g., EX1@−674G, EX1@19C, EX1@+129m, EX5@123T, EX10@+83G, EX11@+54C and EX14@14T). The complements of the isolated nucleic acids are also encompassed by the present invention.

[0253] For example, an isolated nucleic acid of the present invention can have a contiguous span of at least 18, 19, 20, 21, 22, 23, 24, 25, 26, 27, 28, 29, or 30 or 40 or 50 nucleotide residues of SEQ ID NO:70 containing the nucleotide variant EX1@−674G (nucleotide residue No. 51 in SEQ ID NO:70), or a contiguous span of at least 18, 19, 20, 21, 22, 23, 24, 25, 26, 27, 28, 29, or 30 or 40 or 50 nucleotide residues of SEQ ID NO:71 containing the nucleotide variant EX1@19C (nucleotide residue No. 51 in SEQ ID NO:71), or a contiguous span of at least 18, 19, 20, 21, 22, 23, 24, 25, 26, 27, 28, 29, or 30 or 40 or 50 nucleotide residues of SEQ ID NO:72 containing the nucleotide variant EX1@+129m (nucleotide residue No. 51 in SEQ ID NO:72), or a contiguous span of at least 18, 19, 20, 21, 22, 23, 24, 25, 26, 27, 28, 29, or 30 or 40 or 50 nucleotide residues of SEQ ID NO:73 containing the nucleotide variant EX5@123T (nucleotide residue Nos. 51 in SEQ ID NO:73), or a contiguous span of at least 18, 19, 20, 21, 22, 23, 24, 25, 26, 27, 28, 29, or 30 or 40 or 50 nucleotide residues of SEQ ID NO:76 containing the nucleotide variant EX10@+83G (nucleotide residue Nos. 51 in SEQ ID NO:76), or a contiguous span of at least 18, 19, 20, 21, 22, 23, 24, 25, 26, 27, 28, 29, or 30 or 40 or 50 nucleotide residues of SEQ ID NO:77 containing the nucleotide variant EX11@+54C (nucleotide residue Nos. 51 in SEQ ID NO:77), or a contiguous span of at least 18, 19, 20, 21, 22, 23, 24, 25, 26, 27, 28, 29, or 30 or 40 or 50 nucleotide residues of SEQ ID NO:78 containing the nucleotide variant EX14@14T (nucleotide residue Nos. 51 in SEQ ID NO:78), or the complements thereof.

[0254] The present invention further provides an isolated AKAP9 nucleic acid containing at least one of the newly discovered nucleotide variants as summarized in Table 13, or one or more nucleotide variants that will result in the amino acid variants provided in Table 13, e.g., EX10@186G, EX16@−59G, EX39@121T, EX40@470A, EX40@1055G and EX19@1101C. The term “AKAP9 nucleic acid” is as defined above and means a naturally existing nucleic acid coding for a wild-type or variant or mutant AKAP9. The term “AKAP9 nucleic acid” is inclusive and may be in the form of either double-stranded or single-stranded nucleic acids, and a single strand can be either of the two complementing strands. The isolated AKAP9 nucleic acid can be naturally existing genomic DNA, mRNA or cDNA. In one embodiment, the isolated AKAP9 nucleic acid has a nucleotide sequence according to SEQ ID NO:90 but containing one or more exonic nucleotide variants of Table 13 (e.g., EX10@186G and EX39@121T), or the complement thereof.

[0255] In another embodiment, the isolated AKAP9 nucleic acid has a nucleotide sequence that is at least 95%, preferably at least 97% and more preferably at least 99% identical to SEQ ID NO:90 but contains one or more exonic nucleotide variants of Tables 13 and 14 (e.g., EX10@186G and EX39@121T), or one or more nucleotide variants that will result in one or more amino acid variants of Tables 13 and/or 14, or the complement thereof.

[0256] In yet another embodiment, the isolated AKAP9 nucleic acid has a nucleotide sequence encoding AKAP9 protein having an amino acid sequence according to SEQ ID NO:91 but contains one or more amino acid variants of Table 13 and/or 14 (e.g., EX9@459T and EX35@215G). Isolated AKAP9 nucleic acids having a nucleotide sequence that is the complement of the sequence are also encompassed by the present invention.

[0257] In yet another embodiment, the isolated AKAP9 nucleic acid has a nucleotide sequence encoding a AKAP9 protein having an amino acid sequence that is at least 95%, preferably at least 97% and more preferably at least 99% identical to SEQ ID NO:91 but contains one or more amino acid variants of Table 13 and/or 14 (e.g., EX9@459T and EX35@215G), or the complement thereof.

[0258] The present invention also provides an isolated nucleic acid, naturally occurring or artificial, having a nucleotide sequence that is at least 95%, preferably at least 97% and more preferably at least 99% identical to SEQ ID NO:90 except for containing one or more nucleotide variants of Tables 13 and/or 14 (e.g., EX10@186G and EX39@121T), or the complement thereof.

[0259] In another embodiment, the present invention provides an isolated nucleic acid, naturally occurring or artificial, having a nucleotide sequence encoding a AKAP9 protein having an amino acid sequence according to SEQ ID NO:91 but containing one or more amino acid variants of Table 13 and/or 14 (e.g., EX9@459T and EX35@215G). Isolated nucleic acids having a nucleotide sequence that is the complement of the sequence are also encompassed by the present invention.

[0260] In addition, isolated nucleic acids are also provided which have a nucleotide sequence encoding a protein having an amino acid sequence that is at least 95%, preferably at least 97% and more preferably at least 99% identical to SEQ ID NO:91 but containing one or more amino acid variants of Table 13 and/or 14 (e.g., EX9@459T and EX35@215G), or the complement thereof.

[0261] Also encompassed are isolated AKAP9 nucleic acids obtainable by:

(a) providing a human genomic library;

(b) screening the genomic library using a probe having a nucleotide sequence according to any one of SEQ ID NOs:90, 92-94, 96-120; and

[0262] (c) producing a genomic DNA comprising a contiguous span of at least 30 nucleotides of any one of SEQ ID NOs: 90, 92-94, 96-120, wherein the genomic DNA thus produced contains one or more of the SNPs of the present invention in Tables 13 and/or 14, such as EX10@186G, EX16@−59G, EX39@121T, EX40@470A, EX40@1055G and EX19@1011C.

[0263] The present invention also includes AKAP9 nucleic acids obtainable by:

(i) providing a cDNA library using human mRNA from a human tissue, e.g., blood;

(ii) screening the cDNA library using a probe having a nucleotide sequence according to any one of SEQ ID NOs:90, 96-120; and

[0264] (iii) producing a cDNA DNA comprising a contiguous span of at least 30 nucleotides of any one of SEQ ID NOs: 90, 96-120, wherein the cDNA thus produced contains one or more of the SNPs of the present invention in Tables 13 and/or 14, such as EX10@186G and EX39@121T.

[0265] The present invention also encompasses an isolated nucleic acid comprising the nucleotide sequence of a region of a AKAP9 genomic DNA or cDNA or mRNA, wherein the region contains one or more nucleotide variants as provided in Tables 13 and 14 (e.g., EX10@186G, EX16@−59G, EX39@121T, EX40@470A, EX40@1055G and EX19@1011C), or one or more nucleotide variants that will give rise to one or more amino acid variants of Tables 13 and/or 14, or the complement thereof. Such regions can be isolated and analyzed to efficiently detect the nucleotide variants of the present invention. Also, such regions can also be isolated and used as probes or primers in detection of the nucleotide variants of the present invention and other uses as will be clear from the descriptions below.

[0266] Thus, in one embodiment, the isolated nucleic acid comprises a contiguous span of at least 12, 15, 17, 18, 19, 20, 21, 22, 23, 24, 25, 26, 27, 28, 29, 30, 40, 50, 70 or 100 nucleotide residues of a AKAP9 nucleic acid, the contiguous span containing one or more nucleotide variants of Tables 13 and/or 14 (e.g., EX10186G, EX16@−59G, EX39@121T, EX40@470A, EX40@1055G and EX19@1011C), or the complement thereof. In specific embodiments, the isolated nucleic acids are oligonucleotides having a contiguous span of from about 17, 18, 19, 20, 21, 22, 23 or 25 to about 30, 40 or 50, preferably from about 21 to about 30 nucleotide residues, of any AKAP9 nucleic acid, said contiguous span containing one or more nucleotide variants of Tables 13 and/or 14 (e.g., EX10@186G, EX16@−59G, EX39@121T, EX40@470A, EX40@1055G and EX19@1011C).

[0267] In one embodiment, the isolated nucleic acid comprises a contiguous span of at least 12, 15, 17, 18, 19, 20, 21, 22, 23, 24, 25, 26, 27, 28, 29, 30, 40, 50, 70 or 100 nucleotide residues of any one of SEQ ID NOs:96-120, containing one or more nucleotide variants of Tables 13 and 14 (e.g., EX10@186G, EX16@−59G, EX39@121T, EX40@470A, EX40@1055G and EX19@1011C), or the complement thereof. In specific embodiments, the isolated nucleic acid comprises a nucleotide sequence according to any one of SEQ ID NOs: 96-120. In preferred embodiments, the isolated nucleic acids are oligonucleotides having a contiguous span of from about 17, 18, 19, 20, 21, 22, 23 or 25 to about 30, 40 or 50, preferably from about 21 to about 30 nucleotide residues, of any one of SEQ ID NOs: 92-116 and containing one or more nucleotide variants of Tables 13 and/or 14 (e.g., EX10@186G, EX16@−59G, EX39@121T, EX40@470A, EX40@1055G and EX19@1011C). The complements of the isolated nucleic acids are also encompassed by the present invention.

[0268] Thus, for example, an isolated nucleic acid of the present invention can have a contiguous span of at least 18, 19, 20, 21, 22, 23, 24, 25, 26, 27, 28, 29, or 30 or 40 or 50 nucleotide residues of SEQ ID NO:100 containing the nucleotide variant EX10@186G (nucleotide residue No. 51 in SEQ ID NO:100), or a contiguous span of at least 18, 19, 20, 21, 22, 23, 24, 25, 26, 27, 28, 29, or 30 or 40 or 50 nucleotide residues of SEQ ID NO:102 containing the nucleotide variant EX1616-59G (nucleotide residue No. 51 in SEQ ID NO:102), or a contiguous span of at least 18, 19, 20, 21, 22, 23, 24, 25, 26, 27, 28, 29, or 30 or 40 or 50 nucleotide residues of SEQ ID NO:100 containing the nucleotide variant EX39@121T (nucleotide residue No. 110 in SEQ ID NO:106), or a contiguous span of at least 18, 19, 20, 21, 22, 23, 24, 25, 26, 27, 28, 29, or 30 or 40 or 50 nucleotide residues of SEQ ID NO:111 containing the nucleotide variant EX40@470A (nucleotide residue Nos. 51 in SEQ ID NO:1111), or a contiguous span of at least 18, 19, 20, 21, 22, 23, 24, 25, 26, 27, 28, 29, or 30 or 40 or 50 nucleotide residues of SEQ ID NO:113 containing the nucleotide variant EX40@1055G (nucleotide residue Nos. 51, 52 and 53 in SEQ ID NO:113), or a contiguous span of at least 18, 19, 20, 21, 22, 23, 24, 25, 26, 27, 28, 29, or 30 or 40 or 50 nucleotide residues of SEQ ID NO:117 containing the nucleotide variant EX19@1011 (nucleotide residue Nos. 51, 52 and 53 in SEQ ID NO:117), or the complements thereof.

[0269] The present invention further provides an isolated DNAJD1 nucleic acid containing at least one of the newly discovered nucleotide variants as summarized in Tables 15 and 16, or one or more nucleotide variants that will result in the amino acid variants provided in Tables 15 and/or 16, e.g., EX1@527G. The term “DNAJD1 nucleic acid” is as defined above and means a naturally existing nucleic acid coding for a wild-type or variant or mutant DNAJD1. The term “DNAJD1 nucleic acid” is inclusive and may be in the form of either double-stranded or single-stranded nucleic acids, and a single strand can be either of the two complementing strands. The isolated DNAJD1 nucleic acid can be naturally existing genomic DNA, mRNA or cDNA. In one embodiment, the isolated DNAJD1 nucleic acid has a nucleotide sequence according to SEQ ID NO:149 but containing one or more exonic nucleotide variants of Tables 15 and/or 16 (e.g., EX1@527G, and EX1@368T), or the complement thereof.

[0270] In another embodiment, the isolated DNAJD1 nucleic acid has a nucleotide sequence that is at least 95%, preferably at least 97% and more preferably at least 99% identical to SEQ ID NO:149 but contains one or more exonic nucleotide variants of Tables 15 and/or 16 (e.g., EX1@527G and EX1@368T), or one or more nucleotide variants that will result in one or more amino acid variants of Tables 15 and/or 16, or the complement thereof.

[0271] In yet another embodiment, the isolated DNAJD1 nucleic acid has a nucleotide sequence encoding DNAJD1 protein having an amino acid sequence according to SEQ ID NO:150 but contains one or more amino acid variants of Tables 15 and/or 16 (e.g., EX1@527G). Isolated DNAJD1 nucleic acids having a nucleotide sequence that is the complement of the sequence are also encompassed by the present invention.

[0272] In yet another embodiment, the isolated DNAJD1 nucleic acid has a nucleotide sequence encoding a DNAJD1 protein having an amino acid sequence that is at least 95%, preferably at least 97% and more preferably at least 99% identical to SEQ ID NO:150 but contains one or more amino acid variants of Tables 15 and/or 16 (e.g., EX1@527G), or the complement thereof.

[0273] The present invention also provides an isolated nucleic acid, naturally occurring or artificial, having a nucleotide sequence that is at least 95%, preferably at least 97% and more preferably at least 99% identical to SEQ ID NO:149 except for containing one or more nucleotide variants of Tables 15 and/or 16 (e.g., EX1@527G), or the complement thereof.

[0274] In another embodiment, the present invention provides an isolated nucleic acid, naturally occurring or artificial, having a nucleotide sequence encoding a DNAJD1 protein having an amino acid sequence according to SEQ ID NO:150 but containing one or more amino acid variants of Tables 15 and/or 16 (e.g., EX1@527G). Isolated nucleic acids having a nucleotide sequence that is the complement of the sequence are also encompassed by the present invention.

[0275] In addition, isolated nucleic acids are also provided which have a nucleotide sequence encoding a protein having an amino acid sequence that is at least 95%, preferably at least 97% and more preferably at least 99% identical to SEQ ID NO:150 but containing the amino acid variant of Tables 15 and/or 16 (e.g., EX1@527G), or the complement thereof.

[0276] Also encompassed are isolated DNAJD1 nucleic acids obtainable by:

(a) providing a human genomic library;

(b) screening the genomic library using a probe having a nucleotide sequence according to any one of SEQ ID NOs:149, 151-153; and

[0277] (c) producing a genomic DNA comprising a contiguous span of at least 30 nucleotides of any one of SEQ ID NOs:149, 151-153, wherein the genomic DNA thus produced contains one or more of the SNPs of the present invention in Tables 15 and/or 16, such as EX1@527G, EX1@368T and EX5@+72m.

[0278] The present invention also includes isolated DNAJD1 nucleic acids obtainable by:

(i) providing a cDNA library using human mRNA from a human tissue, e.g., blood;

(ii) screening the cDNA library using a probe having a nucleotide sequence according to any one of SEQ ID NOs: 149, 151-153; and

[0279] (iii) producing a cDNA DNA comprising a contiguous span of at least 30 nucleotides of any one of SEQ ID NOs: 149, 151-153, wherein the cDNA thus produced contains one or more of the SNPs of the present invention in Tables 15 and/or 16, such as EX1@527G, EX1@368T and EX5@+72m.

[0280] The present invention also encompasses an isolated nucleic acid comprising the nucleotide sequence of a region of a DNAJD1 genomic DNA or cDNA or mRNA, wherein the region contains one or more nucleotide variants as provided in Tables 15 and/or 16 (e.g., EX1@527G, EX1@368T and EX5@+72m), or one or more nucleotide variants that will give rise to one or more amino acid variants of Tables 15 and/or 16, or the complement thereof. Such regions can be isolated and analyzed to efficiently detect the nucleotide variants of the present invention. Also, such regions can also be isolated and used as probes or primers in detection of the nucleotide variants of the present invention and other uses as will be clear from the descriptions below.

[0281] Thus, in one embodiment, the isolated nucleic acid comprises a contiguous span of at least 12, 15, 17, 18, 19, 20, 21, 22, 23, 24, 25, 26, 27, 28, 29, 30, 40, 50, 70 or 100 nucleotide residues of a DNAJD1 nucleic acid, the contiguous span containing one or more nucleotide variants of Tables 15 and/or 16 (e.g., EX1@527G, EX1@368T and EX5@+72m), or the complement thereof. In specific embodiments, the isolated nucleic acid are oligonucleotides having a contiguous span of from about 17, 18, 19, 20, 21, 22, 23 or 25 to about 30, 40 or 50, preferably from about 21 to about 30 nucleotide residues, of any DNAJD1 nucleic acid, said contiguous span containing one or more nucleotide variants of Tables 15 and/or 16 (e.g., EX1@527G, EX1@368T and EX5@+72m).

[0282] In one embodiment, the isolated nucleic acid comprises a contiguous span of at least 12, 15, 17, 18, 19, 20, 21, 22, 23, 24, 25, 26, 27, 28, 29, 30, 40, 50, 70 or 100 nucleotide residues of any one of SEQ ID NOs:147-151, containing one or more nucleotide variants of Tables 15 and/or 16 (e.g., EX1@527G, EX1@368T and EX5@+72m), or the complement thereof. In specific embodiments, the isolated nucleic acid comprises a nucleotide sequence according to any one of SEQ ID NOs:151-153. In preferred embodiments, the isolated nucleic acid are oligonucleotides having a contiguous span of from about 17, 18, 19, 20, 21, 22, 23 or 25 to about 30, 40 or 50, preferably from about 21 to about 30 nucleotide residues, of any one of SEQ ID NOs: 151-153 and containing one or more nucleotide variants of Tables 15 and/or 16 (e.g., EX1@527G, EX1@368T and EX5@+72m). The complements of the isolated nucleic acids are also encompassed by the present invention.

[0283] Thus, for example, an isolated nucleic acid of the present invention can have a contiguous span of at least 18, 19, 20, 21, 22, 23, 24, 25, 26, 27, 28, 29, or 30 or 40 or 50 nucleotide residues of SEQ ID NO:151 containing the nucleotide variant EX1@368T (nucleotide residue No. 51 in SEQ ID NO:151), or a contiguous span of at least 18, 19, 20, 21, 22, 23, 24, 25, 26, 27, 28, 29, or 30 or 40 or 50 nucleotide residues of SEQ ID NO:152 containing the nucleotide variant EX1@527G (nucleotide residue No. 51 in SEQ ID NO:152), or a contiguous span of at least 18, 19, 20, 21, 22, 23, 24, 25, 26, 27, 28, 29, or 30 or 40 or 50 nucleotide residues of SEQ ID NO:153 containing the nucleotide variant EX1@+72m (nucleotide residue No. 51-53 in SEQ ID NO:153), or the complements thereof.

[0284] Accordingly, the present invention provides an isolated GOLPH4 nucleic acid containing at least one of the newly discovered nucleotide variants as summarized in Table 17, or one or more nucleotide variants that will result in the amino acid variants provided in Table 17, e.g., EX15@−85G, EX15@+86G, EX16@323A, EX16@737G. The term “GOLPH4 nucleic acid” is as defined above and means a naturally existing nucleic acid coding for a wild-type or variant or mutant GOLPH4. The term “GOLPH4 nucleic acid” is inclusive and may be in the form of either double-stranded or single-stranded nucleic acids, and a single strand can be either of the two complementing strands. The isolated GOLPH4 nucleic acid can be naturally existing genomic DNA, mRNA or cDNA. In one embodiment, the isolated GOLPH4 nucleic acid has a nucleotide sequence according to SEQ ID NO:153 but containing one or more exonic nucleotide variants of Tables 17 and/or 18 (e.g., EX15@−85G, EX15@+86G, EX16@323A, EX16@737G) or the complement thereof.

[0285] In yet another embodiment, the isolated GOLPH4 nucleic acid has a nucleotide sequence encoding GOLPH4 protein having an amino acid sequence according to SEQ ID NO:157 but contains one or more amino acid variants of Tables 17 and/or 18. Isolated GOLPH4 nucleic acids having a nucleotide sequence that is the complement of the sequence are also encompassed by the present invention.

[0286] The present invention also provides an isolated nucleic acid, naturally occurring or artificial, having a nucleotide sequence that is at least 95%, preferably at least 97% and more preferably at least 99% identical to SEQ ID NO:156 except for containing one or more nucleotide variants of Tables 17 and/or 18 (e.g. EX15@−85G, EX15@+86G, EX16@323A, EX16@737G), or the complement thereof.

[0287] Also encompassed are isolated GOLPH4 nucleic acids obtainable by:

(a) providing a human genomic library;

(b) screening the genomic library using a probe having a nucleotide sequence according to anyone of SEQ ID NOs:152, 154-159; and

[0288] (c) producing a genomic DNA comprising a contiguous span of at least 30 nucleotides of any one of SEQ ID NOs:152, 154-159, wherein the genomic DNA thus produced contains one or more of the SNPs of the present invention in Tables 17 and/or 18, such as EX15@−85G, EX15@+86G, EX16@323A, EX16@737G.

[0289] The present invention also includes isolated GOLPH4 nucleic acids obtainable by:

(i) providing a cDNA library using human mRNA from a human tissue, e.g., blood;

(ii) screening the cDNA library using a probe having a nucleotide sequence according to any one of SEQ ID NOs: 152, 154-159; and

[0290] (iii) producing a cDNA DNA comprising a contiguous span of at least 30 nucleotides of any one of SEQ ID NOs: 152, 154-159, wherein the cDNA thus produced contains one or more of the SNPs of the present invention in Tables 17 and/or 18, such as EX15@−85G, EX15@+86G, EX16@323A, EX16@737G.

[0291] The present invention also encompasses an isolated nucleic acid comprising the nucleotide sequence of a region of a GOLPH4 genomic DNA or cDNA or mRNA, wherein the region contains one or more nucleotide variants as provided in Tables 17 and/or 18 (e.g., EX15@−85G, EX15@+86G, EX16@323A, EX16@737G), or one or more nucleotide variants that will give rise to one or more amino acid variants of Tables 17 and/or 18, or the complement thereof. Such regions can be isolated and analyzed to efficiently detect the nucleotide variants of the present invention. Also, such regions can also be isolated and used as probes or primers in detection of the nucleotide variants of the present invention and other uses as will be clear from the descriptions below.

[0292] Thus, in one embodiment, the isolated nucleic acid comprises a contiguous span of at least 12, 15, 17, 18, 19, 20, 21, 22, 23, 24, 25, 26, 27, 28, 29, 30, 40, 50, 70 or 100 nucleotide residues of a GOLPH4 nucleic acid, the contiguous span containing one or more nucleotide variants of Tables 17 and/or 18 (e.g. EX15@−85G, EX15@+86G, EX16@323A, EX16@737G), or the complement thereof. In specific embodiments, the isolated nucleic acid are oligonucleotides having a contiguous span of from about 17, 18, 19, 20, 21, 22, 23 or 25 to about 30, 40 or 50, preferably from about 21 to about 30 nucleotide residues, of any GOLPH4 nucleic acid, said contiguous span containing one or more nucleotide variants of Tables 17 and/or 18 (e.g. EX15@−85G, EX15@+86G, EX16@323A, EX16@737G).

[0293] In one embodiment, the isolated nucleic acid comprises a contiguous span of at least 12, 15, 17, 18, 19, 20, 21, 22, 23, 24, 25, 26, 27, 28, 29, 30, 40, 50, 70 or 100 nucleotide residues of any one of SEQ ID NOs:158-167, containing one or more nucleotide variants of Tables 17 and/or 18 (e.g., EX15@−85G, EX15@+86G, EX16@323A, EX16@737G), or the complement thereof. In specific embodiments, the isolated nucleic acid comprises a nucleotide sequence according to any one of SEQ ID NOs: 158-167. In preferred embodiments, the isolated nucleic acid are oligonucleotides having a contiguous span of from about 17, 18, 19, 20, 21, 22, 23 or 25 to about 30, 40 or 50, preferably from about 21 to about 30 nucleotide residues, of any one of SEQ ID NOs: 158-167 and containing one or more nucleotide variants of Tables 17 and/or 18 (e.g., EX15@−85G, EX15@+86G, EX16@323A, EX16@737G). The complements of the isolated nucleic acids are also encompassed by the present invention.

[0294] Thus, for example, an isolated nucleic acid of the present invention can have a contiguous span of at least 18, 19, 20, 21, 22, 23, 24, 25, 26, 27, 28, 29, or 30 or 40 or 50 nucleotide residues of SEQ ID NO:159 containing the nucleotide variant EX15@−85G (nucleotide residue No. 51 in SEQ ID NO:159), or a contiguous span of at least 18, 19, 20, 21, 22, 23, 24, 25, 26, 27, 28, 29, or 30 or 40 or 50 nucleotide residues of SEQ ID NO:160 containing the nucleotide variant EX15@+86G (nucleotide residue No. 51 in SEQ ID NO:160), or a contiguous span of at least 18, 19, 20, 21, 22, 23, 24, 25, 26, 27, 28, 29, or 30 or 40 or 50 nucleotide residues of SEQ ID NO:161 containing the nucleotide variant EX16@323A (nucleotide residue No. 51 in SEQ ID NO:161), or a contiguous span of at least 18, 19, 20, 21, 22, 23, 24, 25, 26, 27, 28, 29, or 30 or 40 or 50 nucleotide residues of SEQ ID NO:162 containing the nucleotide variant EX16@737G (nucleotide residue Nos. 51, 52 and 53 in SEQ ID NO:162), or the complements thereof.

[0295] The present invention further provides an isolated RABEP1 nucleic acid containing at least one of the newly discovered nucleotide variants as summarized in Tables 19-22, or one or more nucleotide variants that will result in the amino acid variants provided in Tables 19-23, e.g., EX1@−511T, EX18@646m, EX18@690m, EX18@903m, EX18@1689m and EX18@2373m. The term “RABEP1 nucleic acid” is as defined above and means a naturally existing nucleic acid coding for a wild-type or variant or mutant RABEP1. The term “RABEP1 nucleic acid” is inclusive and may be in the form of either double-stranded or single-stranded nucleic acids, and a single strand can be either of the two complementing strands. The isolated RABEP1 nucleic acid can be naturally existing genomic DNA, mRNA or cDNA. In one embodiment, the isolated RABEP1 nucleic acid has a nucleotide sequence according to SEQ ID NO:170 but containing one or more exonic nucleotide variants of Tables 19-23 (e.g., EX1@73C, EX14@30C, EX17@15G, EX17@36C and EX17@87A), or the complement thereof.

[0296] In another embodiment, the isolated RABEP1 nucleic acid has a nucleotide sequence that is at least 95%, preferably at least 97% and more preferably at least 99% identical to SEQ ID NO:162 but contains one or more exonic nucleotide variants of Tables 19-23 (e.g., EX1@73C, EX14@30C, EX17@15G, EX17@36C and EX17@87A), or one or more nucleotide variants that will result in one or more amino acid variants of Tables 19-23, or the complement thereof.

[0297] The present invention also provides an isolated nucleic acid, naturally occurring or artificial, having a nucleotide sequence that is at least 95%, preferably at least 97% and more preferably at least 99% identical to SEQ ID NO:170 except for containing one or more nucleotide variants of Tables 19-23 (e.g., EX1@73C, EX14@30C, EX17@15G, EX17@36C and EX17@87A), or the complement thereof.

[0298] Also encompassed are isolated RABEP1 nucleic acids obtainable by:

(a) providing a human genomic library;

(b) screening the genomic library using a probe having a nucleotide sequence according to any one of SEQ ID NOs:170, 172-196; and

[0299] (c) producing a genomic DNA comprising a contiguous span of at least 30 nucleotides of any one of SEQ ID NOs:170, 172-196, wherein the genomic DNA thus produced contains one or more of the SNPs of the present invention in Tables 19-23, such as EX1@−551T, EX18@646m, EX18@690m, EX18@903m, EX18@1689m and EX18@2373m.

[0300] The present invention also includes isolated RABEP1 nucleic acids obtainable by:

(i) providing a cDNA library using human mRNA from a human tissue, e.g., blood;

(ii) screening the cDNA library using a probe having a nucleotide sequence according to any one of SEQ ID NOs:170, 172-196; and

[0301] (iii) producing a cDNA DNA comprising a contiguous span of at least 30 nucleotides of any one of SEQ ID NOs:170, 172-196, wherein the cDNA thus produced contains one or more of the SNPs of the present invention in Tables 19-23, such as EX1@173C, EX14@30C, EX17@15G, EX17@36C and EX17@87A.

[0302] The present invention also encompasses an isolated nucleic acid comprising the nucleotide sequence of a region of a RABEP1 genomic DNA or cDNA or mRNA, wherein the region contains one or more nucleotide variants as provided in Tables 19-23 (e.g., EX1@−551T, EX18@646m, EX18@690m, EX18@903m, EX18@1689m and EX18@2373m), or one or more nucleotide variants that will give rise to one or more amino acid variants of Tables 19-23, or the complement thereof. Such regions can be isolated and analyzed to efficiently detect the nucleotide variants of the present invention. Also, such regions can also be isolated and used as probes or primers in detection of the nucleotide variants of the present invention and other uses as will be clear from the descriptions below.

[0303] Thus, in one embodiment, the isolated nucleic acid comprises a contiguous span of at least 12, 15, 17, 18, 19, 20, 21, 22, 23, 24, 25, 26, 27, 28, 29, 30, 40, 50, 70 or 100 nucleotide residues of a RABEP1 nucleic acid, the contiguous span containing one or more nucleotide variants of Tables 19-23 (e.g., EX1@−551T, EX18@646m, EX18@690m, EX18@903m, EX18@1689m and EX18@2373m), or the complement thereof. In specific embodiments, the isolated nucleic acid are oligonucleotides having a contiguous span of from about 17, 18, 19, 20, 21, 22, 23 or 25 to about 30, 40 or 50, preferably from about 21 to about 30 nucleotide residues, of any RABEP1 nucleic acid, said contiguous span containing one or more nucleotide variants of Tables 19-23 (e.g., EX1@−551T, EX18@646m, EX18@690m, EX18@903m, EX18@1689m and EX18@2373m).

[0304] In one embodiment, the isolated nucleic acid comprises a contiguous span of at least 12, 15, 17, 18, 19, 20, 21, 22, 23, 24, 25, 26, 27, 28, 29, 30, 40, 50, 70 or 100 nucleotide residues of any one of SEQ ID NOs:172-196, containing one or more nucleotide variants of Tables 19-23 (e.g., EX1@−551T, EX18@646m, EX18@690m, EX18@903m, EX18@1689m and EX18@2373m), or the complement thereof. In specific embodiments, the isolated nucleic acid comprises a nucleotide sequence according to any one of SEQ ID NOs:172-196. In preferred embodiments, the isolated nucleic acid are oligonucleotides having a contiguous span of from about 17, 18, 19, 20, 21, 22, 23 or 25 to about 30, 40 or 50, preferably from about 21 to about 30 nucleotide residues, of any one of SEQ ID NOs:172-196 and containing one or more nucleotide variants of Tables 19-23 (e.g., EX1@−551T, EX18@646m, EX18@690m, EX18@903m, EX18@1689m and EX18@2373m). The complements of the isolated nucleic acids are also encompassed by the present invention.

[0305] Thus, for example, an isolated nucleic acid of the present invention can have a contiguous span of at least 18, 19, 20, 21, 22, 23, 24, 25, 26, 27, 28, 29, or 30 or 40 or 50 nucleotide residues of SEQ ID NO:172 containing the nucleotide variant EX1@−551T (nucleotide residue No. 51 in SEQ ID NO:172), or a contiguous span of at least 18, 19, 20, 21, 22, 23, 24, 25, 26, 27, 28, 29, or 30 or 40 or 50 nucleotide residues of SEQ ID NO:180 containing the nucleotide variant EX18@646m (nucleotide residue Nos. 51-69 in SEQ ID NO:180), or a contiguous span of at least 18, 19, 20, 21, 22, 23, 24, 25, 26, 27, 28, 29, or 30 or 40 or 50 nucleotide residues of SEQ ID NO:181 containing the nucleotide variant EX18@690m (nucleotide residue Nos. 51-55 in SEQ ID NO:181), or a contiguous span of at least 18, 19, 20, 21, 22, 23, 24, 25, 26, 27, 28, 29, or 30 or 40 or 50 nucleotide residues of SEQ ID NO:182 containing the nucleotide variant EX18@903m (nucleotide residue No. 51 in SEQ ID NO:182), or a contiguous span of at least 18, 19, 20, 21, 22, 23, 24, 25, 26, 27, 28, 29, or 30 or 40 or 50 nucleotide residues of SEQ ID NO:185 containing the nucleotide variant EX18@1689m (nucleotide residue Nos. 51-55 in SEQ ID NO:185), or a contiguous span of at least 18, 19, 20, 21, 22, 23, 24, 25, 26, 27, 28, 29, or 30 or 40 or 50 nucleotide residues of SEQ ID NO:189 containing the nucleotide variant EX18@2373m (nucleotide residue No. 51 in SEQ ID NO:189), or the complements thereof.

[0306] The present invention further provides an isolated TAP2 nucleic acid containing at least one of the newly discovered nucleotide variants as summarized in Table 24, or one or more nucleotide variants that will result in the amino acid variants provided in Tables 24 and/or 25, e.g., EX12@356T, EX12@358m and EX12@1132m. The term “TAP2 nucleic acid” is as defined above and means a naturally existing nucleic acid coding for a wild-type or variant or mutant TAP2. The term “TAP2 nucleic acid” is inclusive and may be in the form of either double-stranded or single-stranded nucleic acids, and a single strand can be either of the two complementing strands. The isolated TAP2 nucleic acid can be naturally existing genomic DNA, mRNA or cDNA. In one embodiment, the isolated TAP2 nucleic acid has a nucleotide sequence according to SEQ ID NO:202 but containing one or more exonic nucleotide variants of Tables 24 and/or 25 (e.g., EX11@17G, EX12@61G, EX12@127C and EX12@159T), or the complement thereof.

[0307] In another embodiment, the isolated TAP2 nucleic acid has a nucleotide sequence that is at least 95%, preferably at least 97% and more preferably at least 99% identical to SEQ ID NO:202 but contains one or more exonic nucleotide variants of Tables 24 and/or 25 (e.g., EX11@17G, EX12@61G, EX12@127C and EX12@159T), or one or more nucleotide variants that will result in one or more amino acid variants of Tables 24 and/or 25, or the complement thereof.

[0308] In yet another embodiment, the isolated TAP2 nucleic acid has a nucleotide sequence encoding TAP2 protein having an amino acid sequence according to SEQ ID NO:203 but contains one or more amino acid variants of Tables 24 and/or 25 (e.g., EX12@19T and EX12@61G). Isolated TAP2 nucleic acids having a nucleotide sequence that is the complement of the sequence are also encompassed by the present invention.

[0309] In yet another embodiment, the isolated TAP2 nucleic acid has a nucleotide sequence encoding a TAP2 protein having an amino acid sequence that is at least 95%, preferably at least 97% and more preferably at least 99% identical to SEQ ID NO:203 but contains one or more amino acid variants of Tables 24 and/or 25 (e.g., EX12@19T and EX12@61G), or the complement thereof.

[0310] The present invention also provides an isolated nucleic acid, naturally occurring or artificial, having a nucleotide sequence that is at least 95%, preferably at least 97% and more preferably at least 99% identical to SEQ ID NO:202 except for containing one or more nucleotide variants of Tables 24 and/or 25 (e.g., EX11@17G, EX12@61G, EX12@127C and EX12@159T), or the complement thereof.

[0311] In another embodiment, the present invention provides an isolated nucleic acid, naturally occurring or artificial, having a nucleotide sequence encoding a TAP2 protein having an amino acid sequence according to SEQ ID NO:203 but containing one or more amino acid variants of Tables 24 and/or 25 (e.g., EX12@19T and EX12@61G). Isolated nucleic acids having a nucleotide sequence that is the complement of the sequence are also encompassed by the present invention.

[0312] In addition, isolated nucleic acids are also provided which have a nucleotide sequence encoding a protein having an amino acid sequence that is at least 95%, preferably at least 97% and more preferably at least 99% identical to SEQ ID NO:203 but containing one or more amino acid variants of Tables 24 and/or 25 (e.g., EX12@19T and EX12@61G), or the complement thereof.

[0313] Also encompassed are isolated TAP2 nucleic acids obtainable by:

(a) providing a human genomic library;

(b) screening the genomic library using a probe having a nucleotide sequence according to any one of SEQ ID NOs:202, 204, 206-227; and

[0314] (c) producing a genomic DNA comprising a contiguous span of at least 30 nucleotides of any one of SEQ ID NOs: 202, 204, 206-227, wherein the genomic DNA thus produced contains one or more of the SNPs of the present invention in Tables 24 and/or 25, such as EX12@356T, EX12@358m and EX12@1132m.

[0315] The present invention also includes isolated TAP2 nucleic acids obtainable by:

(i) providing a cDNA library using human mRNA from a human tissue, e.g., blood;

(ii) screening the cDNA library using a probe having a nucleotide sequence according to any one of SEQ ID Nos: 202, 204, 206-227; and

[0316] (iii) producing a cDNA DNA comprising a contiguous span of at least 30 nucleotides of any one of SEQ ID NOs: 202, 204, 206-227, wherein the cDNA thus produced contains one or more of the SNPs of the present invention in Tables 24 and/or 25, such as EX12@356T, EX12@358m and EX12@1132m.

[0317] The present invention also encompasses an isolated nucleic acid comprising the nucleotide sequence of a region of a TAP2 genomic DNA or cDNA or mRNA, wherein the region contains one or more nucleotide variants as provided in Tables 24 and/or 25 (e.g., EX12@356T, EX12@358m and EX12@1132m), or one or more nucleotide variants that will give rise to one or more amino acid variants of Tables 24 and/or 25, or the complement thereof. Such regions can be isolated and analyzed to efficiently detect the nucleotide variants of the present invention. Also, such regions can also be isolated and used as probes or primers in detection of the nucleotide variants of the present invention and other uses as will be clear from the descriptions below.

[0318] Thus, in one embodiment, the isolated nucleic acid comprises a contiguous span of at least 12, 15, 17, 18, 19, 20, 21, 22, 23, 24, 25, 26, 27, 28, 29, 30, 40, 50, 70 or 100 nucleotide residues of a TAP2 nucleic acid, the contiguous span containing one or more nucleotide variants of Tables 24 and/or 25 (e.g., EX12@356T, EX12@358m and EX12@1132m), or the complement thereof. In specific embodiments, the isolated nucleic acid are oligonucleotides having a contiguous span of from about 17, 18, 19, 20, 21, 22, 23 or 25 to about 30, 40 or 50, preferably from about 21 to about 30 nucleotide residues, of any TAP2 nucleic acid, said contiguous span containing one or more nucleotide variants of Tables 24 and/or 25 (e.g., EX12@356T, EX12@358m and EX12@1132m).

[0319] In one embodiment, the isolated nucleic acid comprises a contiguous span of at least 12, 15, 17, 18, 19, 20, 21, 22, 23, 24, 25, 26, 27, 28, 29, 30, 40, 50, 70 or 100 nucleotide residues of any one of SEQ ID NOs:206-227, containing one or more nucleotide variants of Tables 24 and/or 25 (e.g., EX12@356T, EX12@358m and EX12@1132m), or the complement thereof. In specific embodiments, the isolated nucleic acid comprises a nucleotide sequence according to any one of SEQ ID NOs: 206-227. In preferred embodiments, the isolated nucleic acid are oligonucleotides having a contiguous span of from about 17, 18, 19, 20, 21, 22, 23 or 25 to about 30, 40 or 50, preferably from about 21 to about 30 nucleotide residues, of any one of SEQ ID NOs: 206-227 and containing one or more nucleotide variants of Tables 24 and/or 25 (e.g., EX12@356T, EX12@358m and EX12@1132m). The complements of the isolated nucleic acids are also encompassed by the present invention.

[0320] Thus, for example, an isolated nucleic acid of the present invention can have a contiguous span of at least 18, 19, 20, 21, 22, 23, 24, 25, 26, 27, 28, 29, or 30 or 40 or 50 nucleotide residues of SEQ ID NO:212 containing the nucleotide variant EX12@356T (nucleotide residue No. 51 in SEQ ID NO:212), or a contiguous span of at least 18, 19, 20, 21, 22, 23, 24, 25, 26, 27, 28, 29, or 30 or 40 or 50 nucleotide residues of SEQ ID NO:217 containing the nucleotide variant, EX12@358m (nucleotide residue No. 51-60 in SEQ ID NO:217), or a contiguous span of at least 18, 19, 20, 21, 22, 23, 24, 25, 26, 27, 28, 29, or 30 or 40 or 50 nucleotide residues of SEQ ID NO:225 containing the nucleotide variant and EX12@1132m (nucleotide residue No. 51-226 in SEQ ID NO:225), or the complements thereof.

[0321] The present invention further provides an isolated NARG2 nucleic acid containing at least one of the newly discovered nucleotide variants as summarized in Table 26, or one or more nucleotide variants that will result in the amino acid variants provided in Table 26, e.g., EX14@+15C, EX16@1757m, EX16@2306G, EX16@2547G and EX16@4025m. The term “NARG2 nucleic acid” is as defined above and means a naturally existing nucleic acid coding for a wild-type or variant or mutant NARG2. The term “NARG2 nucleic acid” is inclusive and may be in the form of either double-stranded or single-stranded nucleic acids, and a single strand can be either of the two complementing strands. The isolated NARG2 nucleic acid can be naturally existing genomic DNA, mRNA or cDNA. In one embodiment, the isolated NARG2 nucleic acid has a nucleotide sequence according to SEQ ID NO:230 but containing one or more exonic nucleotide variants of Table 26 (e.g., EX12@48C), or the complement thereof.

[0322] In another embodiment, the isolated NARG2 nucleic acid has a nucleotide sequence that is at least 95%, preferably at least 97% and more preferably at least 99% identical to SEQ ID NO:230 but contains one or more exonic nucleotide variants of Table 26 (e.g., EX12@48C), or one or more nucleotide variants that will result in one or more amino acid variants of Table 26, or the complement thereof.

[0323] In yet another embodiment, the isolated NARG2 nucleic acid has a nucleotide sequence encoding NARG2 protein having an amino acid sequence according to SEQ ID NO:231 but contains one or more amino acid variants of Table 26 (e.g., EX12@48C). Isolated NARG2 nucleic acids having a nucleotide sequence that is the complement of the sequence are also encompassed by the present invention.

[0324] The present invention also provides an isolated nucleic acid, naturally occurring or artificial, having a nucleotide sequence that is at least 95%, preferably at least 97% and more preferably at least 99% identical to SEQ ID NO:230 except for containing one or more nucleotide variants of Table 26 (e.g., EX12@48C), or the complement thereof.

[0325] Also encompassed are isolated NARG2 nucleic acids obtainable by:

(a) providing a human genomic library;

(b) screening the genomic library using a probe having a nucleotide sequence according to any one of SEQ ID NOs:230, 232-238; and

[0326] (c) producing a genomic DNA comprising a contiguous span of at least 30 nucleotides of any one of SEQ ID NOs: 230, 232-238, wherein the genomic DNA thus produced contains one or more of the SNPs of the present invention in Table 26, such as EX14@+15C, EX16@1757m, EX16@2306G, EX16@2547G and EX16@4025m.

[0327] The present invention also includes isolated NARG2 nucleic acids obtainable by:

(i) providing a cDNA library using human mRNA from a human tissue, e.g., blood;

(ii) screening the cDNA library using a probe having a nucleotide sequence according to any one of SEQ ID NOs 230, 232-238; and

(iii) producing a cDNA DNA comprising a contiguous span of at least 30 nucleotides of any one of SEQ ID NOs: 230, 232-238, wherein the cDNA thus produced contains one or more of the SNPs of the present invention in Table 26, such as EX12@48C.

[0328] The present invention also encompasses an isolated nucleic acid comprising the nucleotide sequence of a region of a NARG2 genomic DNA or cDNA or mRNA, wherein the region contains one or more nucleotide variants as provided in Table 26 (e.g., EX14@+15C, EX16@1757m, EX16@2306G, EX16@2547G and EX16@4025m), or one or more nucleotide variants that will give rise to one or more amino acid variants of Table 26, or the complement thereof. Such regions can be isolated and analyzed to efficiently detect the nucleotide variants of the present invention. Also, such regions can also be isolated and used as probes or primers in detection of the nucleotide variants of the present invention and other uses as will be clear from the descriptions below.

[0329] Thus, in one embodiment, the isolated nucleic acid comprises a contiguous span of at least 12, 15, 17, 18, 19, 20, 21, 22, 23, 24, 25, 26, 27, 28, 29, 30, 40, 50, 70 or 100 nucleotide residues of a NARG2 nucleic acid, the contiguous span containing one or more nucleotide variants of Table 26 (e.g., EX14@+15C, EX16@1757m, EX16@2306G, EX16@2547G and EX16@4025m), or the complement thereof. In specific embodiments, the isolated nucleic acid are oligonucleotides having a contiguous span of from about 17, 18, 19, 20, 21, 22, 23 or 25 to about 30, 40 or 50, preferably from about 21 to about 30 nucleotide residues, of any NARG2 nucleic acid, said contiguous span containing one or more nucleotide variants of Table 26 (e.g., EX14@+15C, EX16@1757m, EX16@2306G, EX16@2547G and EX16@4025m).

[0330] In one embodiment, the isolated nucleic acid comprises a contiguous span of at least 12, 15, 17, 18, 19, 20, 21, 22, 23, 24, 25, 26, 27, 28, 29, 30, 40, 50, 70 or 100 nucleotide residues of any one of SEQ ID NOs:232-238, containing one or more nucleotide variants of Table 26 (e.g., EX14@+15C, EX16@1757m, EX16@2306G, EX16@2547G and EX16@4025m), or the complement thereof. In specific embodiments, the isolated nucleic acid comprises a nucleotide sequence according to any one of SEQ ID NOs: 232-238. In preferred embodiments, the isolated nucleic acid are oligonucleotides having a contiguous span of from about 17, 18, 19, 20, 21, 22, 23 or 25 to about 30, 40 or 50, preferably from about 21 to about 30 nucleotide residues, of any one of SEQ ID NOs: 232-238 and containing one or more nucleotide variants of Table 26 (e.g., EX14@+15C, EX16@1757m, EX16@2306G, EX16@2547G and EX16@4025m). The complements of the isolated nucleic acids are also encompassed by the present invention.

[0331] Thus, for example, an isolated nucleic acid of the present invention can have a contiguous span of at least 18, 19, 20, 21, 22, 23, 24, 25, 26, 27, 28, 29, or 30 or 40 or 50 nucleotide residues of SEQ ID NO:234 containing the nucleotide variant EX14@+15C (nucleotide residue No. 51 in SEQ ID NO:234), or a contiguous span of at least 18, 19, 20, 21, 22, 23, 24, 25, 26, 27, 28, 29, or 30 or 40 or 50 nucleotide residues of SEQ ID NO:235 containing the nucleotide variant EX16@1757m (nucleotide residue No. 51 in SEQ ID NO:235), or a contiguous span of at least 18, 19, 20, 21, 22, 23, 24, 25, 26, 27, 28, 29, or 30 or 40 or 50 nucleotide residues of SEQ ID NO:237 containing the nucleotide variant EX16@2547G (nucleotide residue No. 51 in SEQ ID NO:237), or a contiguous span of at least 18, 19, 20, 21, 22, 23, 24, 25, 26, 27, 28, 29, or 30 or 40 or 50 nucleotide residues of SEQ ID NO:236 containing the nucleotide variant EX16@2306G (nucleotide residue Nos. 51, 52 and 53 in SEQ ID NO:236), or a contiguous span of at least 18, 19, 20, 21, 22, 23, 24, 25, 26, 27, 28, 29, or 30 or 40 or 50 nucleotide residues of SEQ ID NO:238 containing the nucleotide variant EX16@4025m (nucleotide residue Nos. 51, 52, 53, 54 and 55 in SEQ ID NO:238), or the complements thereof.

[0332] The present invention further provides an isolated DDX58 nucleic acid containing at least one of the newly discovered nucleotide variants as summarized in Table 27, or one or more nucleotide variants that will result in the amino acid variants provided in Table 27. The term “DDX58 nucleic acid” is as defined above and means a naturally existing nucleic acid coding for a wild-type or variant or mutant DDX58. The term “DDX58 nucleic acid” is inclusive and may be in the form of either double-stranded or single-stranded nucleic acids, and a single strand can be either of the two complementing strands. The isolated DDX58 nucleic acid can be naturally existing genomic DNA, mRNA or cDNA. In one embodiment, the isolated DDX58 nucleic acid has a nucleotide sequence according to SEQ ID NO:274 but containing one or more exonic nucleotide variants of Table 27 (e.g., EX17@63), or the complement thereof.

[0333] In another embodiment, the isolated DDX58 nucleic acid has a nucleotide sequence that is at least 95%, preferably at least 97% and more preferably at least 99% identical to SEQ ID NO:274 but contains one or more exonic nucleotide variants of Table 27, or one or more nucleotide variants that will result in one or more amino acid variants of Table 27, or the complement thereof.

[0334] In yet another embodiment, the isolated DDX58 nucleic acid has a nucleotide sequence encoding DDX58 protein having an amino acid sequence according to SEQ ID NO:275 but contains one or more amino acid variants of Table 27. Isolated DDX58 nucleic acids having a nucleotide sequence that is the complement of the sequence are also encompassed by the present invention.

[0335] In yet another embodiment, the isolated DDX58 nucleic acid has a nucleotide sequence encoding a DDX58 protein having an amino acid sequence that is at least 95%, preferably at least 97% and more preferably at least 99% identical to SEQ ID NO:275 but contains one or more amino acid variants of Table 27, or the complement thereof.

[0336] The present invention also provides an isolated nucleic acid, naturally occurring or artificial, having a nucleotide sequence that is at least 95%, preferably at least 97% and more preferably at least 99% identical to SEQ ID NO:274 except for containing one or more nucleotide variants of Table 27, or the complement thereof.

[0337] In another embodiment, the present invention provides an isolated nucleic acid, naturally occurring or artificial, having a nucleotide sequence encoding a DDX58 protein having an amino acid sequence according to SEQ ID NO:275 but containing one or more amino acid variants of Table 27. Isolated nucleic acids having a nucleotide sequence that is the complement of the sequence are also encompassed by the present invention.

[0338] In addition, isolated nucleic acids are also provided which have a nucleotide sequence encoding a protein having an amino acid sequence that is at least 95%, preferably at least 97% and more preferably at least 99% identical to SEQ ID NO:275 but containing one or more amino acid variants of Table 27, or the complement thereof.

[0339] Also encompassed are isolated DDX58 nucleic acids obtainable by:

(a) providing a human genomic library;

(b) screening the genomic library using a probe having a nucleotide sequence according to any one of SEQ ID NOs: 274, 276, 277; and

(c) producing a genomic DNA comprising a contiguous span of at least 30 nucleotides of any one of SEQ ID NOs: 274, 276, 277, wherein the genomic DNA thus produced contains one or more of the SNPs of the present invention in Table 27.

[0340] The present invention also includes isolated DDX58 nucleic acids obtainable by:

(i) providing a cDNA library using human mRNA from a human tissue, e.g., blood;

(ii) screening the cDNA library using a probe having a nucleotide sequence according to any one of SEQ ID NOs: 274, 276, 277; and

(iii) producing a cDNA DNA comprising a contiguous span of at least 30 nucleotides of any one of SEQ ID NOs: 274, 276, 277, wherein the cDNA thus produced contains one or more of the variants of the present invention in Table 27.

[0341] The present invention also encompasses an isolated nucleic acid comprising the nucleotide sequence of a region of a DDX58 genomic DNA or cDNA or mRNA, wherein the region contains one or more nucleotide variants as provided in Table 27, or one or more nucleotide variants that will give rise to one or more amino acid variants of Tables 27, or the complement thereof. Such regions can be isolated and analyzed to efficiently detect the nucleotide variants of the present invention. Also, such regions can also be isolated and used as probes or primers in detection of the nucleotide variants of the present invention and other uses as will be clear from the descriptions below.

[0342] Thus, in one embodiment, the isolated nucleic acid comprises a contiguous span of at least 12, 15, 17, 18, 19, 20, 21, 22, 23, 24, 25, 26, 27, 28, 29, 30, 40, 50, 70 or 100 nucleotide residues of a DDX58 nucleic acid, the contiguous span containing one or more nucleotide variants selected from those in Table 27, or the complement thereof. In specific embodiments, the isolated nucleic acids are oligonucleotides having a contiguous span of from about 17, 18, 19, 20, 21, 22, 23 or 25 to about 30, 40 or 50, preferably from about 21 to about 30 nucleotide residues, of any DDX58 nucleic acid, said contiguous span containing one or more nucleotide variants of Table 27.

[0343] In one embodiment, the isolated nucleic acid comprises a contiguous span of at least 12, 15, 17, 18, 19, 20, 21, 22, 23, 24, 25, 26, 27, 28, 29, 30, 40, 50, 70 or 100 nucleotide residues of any one of SEQ ID NOs:276-277, containing one or more nucleotide variants of Tables 27, or the complement thereof. In specific embodiments, the isolated nucleic acid comprises a nucleotide sequence according to any one of SEQ ID NOs:276-277. In preferred embodiments, the isolated nucleic acids are oligonucleotides having a contiguous span of from about 17, 18, 19, 20, 21, 22, 23 or 25 to about 30, 40 or 50, preferably from about 21 to about 30 nucleotide residues, of any one of SEQ ID NOs:276-277 and containing one or more nucleotide variants of Tables 27. The complements of the isolated nucleic acids are also encompassed by the present invention.

[0344] Thus, for example, an isolated nucleic acid of the present invention can have a contiguous span of at least 18, 19, 20, 21, 22, 23, 24, 25, 26, 27, 28, 29, or 30 or 40 or 50 nucleotide residues of SEQ ID NO:276 containing the nucleotide variant EX14@+78 (nucleotide residue No. 51 in SEQ ID NO:276), or a contiguous span of at least 18, 19, 20, 21, 22, 23, 24, 25, 26, 27, 28, 29, or 30 or 40 or 50 nucleotide residues of SEQ ID NO:277 containing the nucleotide variant EX17@63 (nucleotide residue No. 51 in SEQ ID NO:277, or the complements thereof.

[0345] The present invention further provides an isolated CD39 nucleic acid containing at least one of the newly discovered nucleotide variants as summarized in Table 28, or one or more nucleotide variants that will result in the amino acid variants provided in Tables 28 and/or 29. The term “CD39 nucleic acid” is as defined above and means a naturally existing nucleic acid coding for a wild-type or variant or mutant CD39. The term “CD39 nucleic acid” is inclusive and may be in the form of either double-stranded or single-stranded nucleic acids, and a single strand can be either of the two complementing strands. The isolated CD39 nucleic acid can be naturally existing genomic DNA, mRNA or cDNA. In one embodiment, the isolated CD39 nucleic acid has a nucleotide sequence according to SEQ ID NO:243 but containing one or more exonic nucleotide variants of Table 28 and/or 29 (e.g., EX17@63), or the complement thereof.

[0346] In another embodiment, the isolated CD39 nucleic acid has a nucleotide sequence that is at least 95%, preferably at least 97% and more preferably at least 99% identical to SEQ ID NO:243, but contains one or more exonic nucleotide variants of Table 28 and/or Table 29, or one or more nucleotide variants that will result in one or more amino acid variants of Table 28 and/or Table 29, or the complement thereof.

[0347] In yet another embodiment, the isolated CD39 nucleic acid has a nucleotide sequence encoding CD39 protein having an amino acid sequence according to SEQ ID NO:244 but contains one or more amino acid variants of Table 29 and/or Table 29. Isolated CD39 nucleic acids having a nucleotide sequence that is the complement of the sequence are also encompassed by the present invention.

[0348] In yet another embodiment, the isolated CD39 nucleic acid has a nucleotide sequence encoding a CD39 protein having an amino acid sequence that is at least 95%, preferably at least 97% and more preferably at least 99% identical to SEQ ID NO:244 but contains one or more amino acid variants of Table 28 and/or Table 29, or the complement thereof.

[0349] The present invention also provides an isolated nucleic acid, naturally occurring or artificial, having a nucleotide sequence that is at least 95%, preferably at least 97% and more preferably at least 99% identical to SEQ ID NO:243 except for containing one or more nucleotide variants of Table 28 and/or Table 29, or the complement thereof.

[0350] In another embodiment, the present invention provides an isolated nucleic acid, naturally occurring or artificial, having a nucleotide sequence encoding a CD39 protein having an amino acid sequence according to SEQ ID NO:244 but containing one or more amino acid variants of Table 28 and/or Table 29. Isolated nucleic acids having a nucleotide sequence that is the complement of the sequence are also encompassed by the present invention.

[0351] In addition, isolated nucleic acids are also provided which have a nucleotide sequence encoding a protein having an amino acid sequence that is at least 95%, preferably at least 97% and more preferably at least 99% identical to SEQ ID NO:244 but containing one or more amino acid variants of Table 28 and/or Table 29, or the complement thereof.

[0352] Also encompassed are isolated CD39 nucleic acids obtainable by:

(a) providing a human genomic library;

(b) screening the genomic library using a probe having a nucleotide sequence according to any one of SEQ ID NOs: 244, 246, 247; and

(c) producing a genomic DNA comprising a contiguous span of at least 30 nucleotides of any one of SEQ ID NOs: 244, 246, 247, wherein the genomic DNA thus produced contains one or more of the SNPs of the present invention in Table 28 and/or Table 29.

[0353] The present invention also includes isolated CD39 nucleic acids obtainable by:

(i) providing a cDNA library using human mRNA from a human tissue, e.g., blood;

(ii) screening the cDNA library using a probe having a nucleotide sequence according to any one of SEQ ID NOs: 244, 246, 247; and

(iii) producing a cDNA DNA comprising a contiguous span of at least 30 nucleotides of any one of SEQ ID NOs: 244, 246, 247, wherein the cDNA thus produced contains one or more of the variants of the present invention in Table 28 and/or Table 29.

[0354] The present invention also encompasses an isolated nucleic acid comprising the nucleotide sequence of a region of a CD39 genomic DNA or cDNA or mRNA, wherein the region contains one or more nucleotide variants as provided in Tables 1 and 2, or one or more nucleotide variants that will give rise to one or more amino acid variants of Table 28 and/or Table 29, or the complement thereof. Such regions can be isolated and analyzed to efficiently detect the nucleotide variants of the present invention. Also, such regions can also be isolated and used as probes or primers in detection of the nucleotide variants of the present invention and other uses as will be clear from the descriptions below.

[0355] Thus, in one embodiment, the isolated nucleic acid comprises a contiguous span of at least 12, 15, 17, 18, 19, 20, 21, 22, 23, 24, 25, 26, 27, 28, 29, 30, 40, 50, 70 or 100 nucleotide residues of a CD39 nucleic acid, the contiguous span containing one or more nucleotide variants selected from those in Tables 1 and 2, or the complement thereof. In specific embodiments, the isolated nucleic acids are oligonucleotides having a contiguous span of from about 17, 18, 19, 20, 21, 22, 23 or 25 to about 30, 40 or 50, preferably from about 21 to about 30 nucleotide residues, of any CD39 nucleic acid, said contiguous span containing one or more nucleotide variants of Table 28 and/or Table 29.

[0356] In one embodiment, the isolated nucleic acid comprises a contiguous span of at least 12, 15, 17, 18, 19, 20, 21, 22, 23, 24, 25, 26, 27, 28, 29, 30, 40, 50, 70 or 100 nucleotide residues of any one of SEQ ID NOs:245-246, containing one or more nucleotide variants of Table 28 and/or Table 29, or the complement thereof. In specific embodiments, the isolated nucleic acid comprises a nucleotide sequence according to any one of SEQ ID NOs: 245-246. In preferred embodiments, the isolated nucleic acids are oligonucleotides having a contiguous span of from about 17, 18, 19, 20, 21, 22, 23 or 25 to about 30, 40 or 50, preferably from about 21 to about 30 nucleotide residues, of any one of SEQ ID NOs: 245-246 and containing one or more nucleotide variants of Table 28 and/or Table 29. The complements of the isolated nucleic acids are also encompassed by the present invention.

[0357] Thus, for example, an isolated nucleic acid of the present invention can have a contiguous span of at least 18, 19, 20, 21, 22, 23, 24, 25, 26, 27, 28, 29, or 30 or 40 or 50 nucleotide residues of SEQ ID NO:245 containing the nucleotide variant EX4@−10 (nucleotide residue No. 51 in SEQ ID NO:245), or a contiguous span of at least 18, 19, 20, 21, 22, 23, 24, 25, 26, 27, 28, 29, or 30 or 40 or 50 nucleotide residues of SEQ ID NO:246 containing the nucleotide variant EX10@3061 (nucleotide residue No. 51 in SEQ ID NO:246), or the complements thereof.

[0358] Accordingly, the present invention provides an isolated FKBP1a nucleic acid containing at least one of the newly discovered nucleotide variants as summarized in Table 30, or one or more nucleotide variants that will result in the amino acid variants provided in Table 30. The term “FKBP1a nucleic acid” is as defined above and means a naturally existing nucleic acid coding for a wild-type or variant or mutant FKBP1a. The term “FKBP1a nucleic acid” is inclusive and may be in the form of either double-stranded or single-stranded nucleic acids, and a single strand can be either of the two complementing strands. The isolated FKBP1a nucleic acid can be naturally existing genomic DNA, mRNA or cDNA. In one embodiment, the isolated FKBP1a nucleic acid has a nucleotide sequence according to SEQ ID NO:249 but containing one or more exonic nucleotide variants of Table 30 (e.g., EX5@8A), or the complement thereof.

[0359] In another embodiment, the isolated FKBP1a nucleic acid has a nucleotide sequence that is at least 95%, preferably at least 97% and more preferably at least 99% identical to SEQ ID NO:249 but contains one or more exonic nucleotide variants of Table 30, or one or more nucleotide variants that will result in one or more amino acid variants of Table 30, or the complement thereof.

[0360] In yet another embodiment, the isolated FKBP1a nucleic acid has a nucleotide sequence encoding FKBP1a protein having an amino acid sequence according to SEQ ID NO:250 but contains one or more amino acid variants of Table 30. Isolated FKBP1a nucleic acids having a nucleotide sequence that is the complement of the sequence are also encompassed by the present invention.

[0361] In yet another embodiment, the isolated FKBP1a nucleic acid has a nucleotide sequence encoding a FKBP1a protein having an amino acid sequence that is at least 95%, preferably at least 97% and more preferably at least 99% identical to SEQ ID NO:250 but contains one or more amino acid variants of Table 30, or the complement thereof.

[0362] The present invention also provides an isolated nucleic acid, naturally occurring or artificial, having a nucleotide sequence that is at least 95%, preferably at least 97% and more preferably at least 99% identical to SEQ ID NO:249 except for containing one or more nucleotide variants of Table 30, or the complement thereof.

[0363] In another embodiment, the present invention provides an isolated nucleic acid, naturally occurring or artificial, having a nucleotide sequence encoding a FKBP1a protein having an amino acid sequence according to SEQ ID NO:250 but containing one or more amino acid variants of Table 30. Isolated nucleic acids having a nucleotide sequence that is the complement of the sequence are also encompassed by the present invention.

[0364] In addition, isolated nucleic acids are also provided which have a nucleotide sequence encoding a protein having an amino acid sequence that is at least 95%, preferably at least 97% and more preferably at least 99% identical to SEQ ID NO:250 but containing one or more amino acid variants of Table 30, or the complement thereof.

[0365] Also encompassed are isolated FKBP1a nucleic acids obtainable by:

(a) providing a human genomic library;

(b) screening the genomic library using a probe having a nucleotide sequence according to any one of SEQ ID NOs:249, 251; and

(c) producing a genomic DNA comprising a contiguous span of at least 30 nucleotides of any one of SEQ ID NOs: 249, 251, wherein the genomic DNA thus produced contains one or more of the SNPs of the present invention in Table 30.

[0366] The present invention also includes isolated FKBP1a nucleic acids obtainable by:

(i) providing a cDNA library using human mRNA from a human tissue, e.g., blood;

(ii) screening the cDNA library using a probe having a nucleotide sequence according to any one of SEQ ID NOs:249, 251; and

(iii) producing a cDNA DNA comprising a contiguous span of at least 30 nucleotides of any one of SEQ ID NOs:249, 251, wherein the cDNA thus produced contains one or more of the variants of the present invention in Table 30.

[0367] The present invention also encompasses an isolated nucleic acid comprising the nucleotide sequence of a region of a FKBP1a genomic DNA or cDNA or mRNA, wherein the region contains one or more nucleotide variants as provided in Table 30, or one or more nucleotide variants that will give rise to one or more amino acid variants of Table 30, or the complement thereof. Such regions can be isolated and analyzed to efficiently detect the nucleotide variants of the present invention. Also, such regions can also be isolated and used as probes or primers in detection of the nucleotide variants of the present invention and other uses as will be clear from the descriptions below.

[0368] Thus, in one embodiment, the isolated nucleic acid comprises a contiguous span of at least 12, 15, 17, 18, 19, 20, 21, 22, 23, 24, 25, 26, 27, 28, 29, 30, 40, 50, 70 or 100 nucleotide residues of a FKBP1a nucleic acid, the contiguous span containing one or more nucleotide variants selected from those in Table 30, or the complement thereof. In specific embodiments, the isolated nucleic acids are oligonucleotides having a contiguous span of from about 17, 18, 19, 20, 21, 22, 23 or 25 to about 30, 40 or 50, preferably from about 21 to about 30 nucleotide residues, of any FKBP1a nucleic acid, said contiguous span containing one or more nucleotide variants of Table 30.

[0369] In one embodiment, the isolated nucleic acid comprises a contiguous span of at least 12, 15, 17, 18, 19, 20, 21, 22, 23, 24, 25, 26, 27, 28, 29, 30, 40, 50, 70 or 100 nucleotide residues of any one of SEQ ID NO:251, containing one or more nucleotide variants of Table 30, or the complement thereof. In specific embodiments, the isolated nucleic acid comprises a nucleotide sequence according to any one of SEQ ID NO:251. In preferred embodiments, the isolated nucleic acids are oligonucleotides having a contiguous span of from about 17, 18, 19, 20, 21, 22, 23 or 25 to about 30, 40 or 50, preferably from about 21 to about 30 nucleotide residues, of any one of SEQ ID NO:251 and containing one or more nucleotide variants of Table 30. The complements of the isolated nucleic acids are also encompassed by the present invention.

[0370] Thus, for example, an isolated nucleic acid of the present invention can have a contiguous span of at least 18, 19, 20, 21, 22, 23, 24, 25, 26, 27, 28, 29, or 30 or 40 or 50 nucleotide residues of SEQ ID NO:251 containing the nucleotide variant EX5@8A (nucleotide residue No. 51 in SEQ ID NO:251), or the complements thereof.

[0371] The present invention further provides an isolated SRI nucleic acid containing at least one of the newly discovered nucleotide variants as summarized in Tables 1 and 2, or one or more nucleotide variants that will result in the amino acid variants provided in Table 31. The term “SRI nucleic acid” is as defined above and means a naturally existing nucleic acid coding for a wild-type or variant or mutant SRI. The term “SRI nucleic acid” is inclusive and may be in the form of either double-stranded or single-stranded nucleic acids, and a single strand can be either of the two complementing strands. The isolated SRI nucleic acid can be naturally existing genomic DNA, mRNA or cDNA. In one embodiment, the isolated SRI nucleic acid has a nucleotide sequence according to SEQ ID NO:253 but containing one or more exonic nucleotide variants of Table 31 (e.g., EX9@351), or the complement thereof.

[0372] In another embodiment, the isolated SRI nucleic acid has a nucleotide sequence that is at least 95%, preferably at least 97% and more preferably at least 99% identical to SEQ ID NO:253 but contains one or more exonic nucleotide variants of Table 31, or one or more nucleotide variants that will result in one or more amino acid variants of Table 31, or the complement thereof.

[0373] In yet another embodiment, the isolated SRI nucleic acid has a nucleotide sequence encoding SRI protein having an amino acid sequence according to SEQ ID NO:254 but contains one or more amino acid variants of Table 31. Isolated SRI nucleic acids having a nucleotide sequence that is the complement of the sequence are also encompassed by the present invention.

[0374] In yet another embodiment, the isolated SRI nucleic acid has a nucleotide sequence encoding a SRI protein having an amino acid sequence that is at least 95%, preferably at least 97% and more preferably at least 99% identical to SEQ ID NO:254 but contains one or more amino acid variants of Table 31, or the complement thereof.

[0375] The present invention also provides an isolated nucleic acid, naturally occurring or artificial, having a nucleotide sequence that is at least 95%, preferably at least 97% and more preferably at least 99% identical to SEQ ID NO:253 except for containing one or more nucleotide variants of Table 31, or the complement thereof.

[0376] In another embodiment, the present invention provides an isolated nucleic acid, naturally occurring or artificial, having a nucleotide sequence encoding a SRI protein having an amino acid sequence according to SEQ ID NO:254 but containing one or more amino acid variants of Table 31. Isolated nucleic acids having a nucleotide sequence that is the complement of the sequence are also encompassed by the present invention.

[0377] In addition, isolated nucleic acids are also provided which have a nucleotide sequence encoding a protein having an amino acid sequence that is at least 95%, preferably at least 97% and more preferably at least 99% identical to SEQ ID NO:254 but containing one or more amino acid variants of Table 31, or the complement thereof.

[0378] Also encompassed are isolated SRI nucleic acids obtainable by:

(a) providing a human genomic library;

(b) screening the genomic library using a probe having a nucleotide sequence according to any one of SEQ ID NO:253, 255; and

(c) producing a genomic DNA comprising a contiguous span of at least 30 nucleotides of any one of SEQ ID NOs:253, 255, wherein the genomic DNA thus produced contains one or more of the SNPs of the present invention in Table 31.

[0379] The present invention also includes isolated SRI nucleic acids obtainable by:

(i) providing a cDNA library using human mRNA from a human tissue, e.g., blood;

(ii) screening the cDNA library using a probe having a nucleotide sequence according to any one of SEQ ID NO:253, 255; and

(iii) producing a cDNA DNA comprising a contiguous span of at least 30 nucleotides of any one of SEQ ID NO:253, 255, wherein the cDNA thus produced contains one or more of the variants of the present invention in Table 31.

[0380] The present invention also encompasses an isolated nucleic acid comprising the nucleotide sequence of a region of a SRI genomic DNA or cDNA or mRNA, wherein the region contains one or more nucleotide variants as provided in Table 31, or one or more nucleotide variants that will give rise to one or more amino acid variants of Table 31, or the complement thereof. Such regions can be isolated and analyzed to efficiently detect the nucleotide variants of the present invention. Also, such regions can also be isolated and used as probes or primers in detection of the nucleotide variants of the present invention and other uses as will be clear from the descriptions below.

[0381] Thus, in one embodiment, the isolated nucleic acid comprises a contiguous span of at least 12, 15, 17, 18, 19, 20, 21, 22, 23, 24, 25, 26, 27, 28, 29, 30, 40, 50, 70 or 100 nucleotide residues of a SRI nucleic acid, the contiguous span containing one or more nucleotide variants selected from those in Table 31, or the complement thereof. In specific embodiments, the isolated nucleic acids are oligonucleotides having a contiguous span of from about 17, 18, 19, 20, 21, 22, 23 or 25 to about 30, 40 or 50, preferably from about 21 to about 30 nucleotide residues, of any SRI nucleic Table 31.

[0382] In one embodiment, the isolated nucleic acid comprises a contiguous span of at least 12, 15, 17, 18, 19, 20, 21, 22, 23, 24, 25, 26, 27, 28, 29, 30, 40, 50, 70 or 100 nucleotide residues of SEQ ID NO: 255, containing one or more nucleotide variants of Table 31, or the complement thereof. In specific embodiments, the isolated nucleic acid comprises a nucleotide sequence according to SEQ ID NO:253, 255. In preferred embodiments, the isolated nucleic acids are oligonucleotides having a contiguous span of from about 17, 18, 19, 20, 21, 22, 23 or 25 to about 30, 40 or 50, preferably from about 21 to about 30 nucleotide residues, of SEQ ID NO:253, 255 and containing one or more nucleotide variants of Table 31. The complements of the isolated nucleic acids are also encompassed by the present invention.

[0383] Thus, for example, an isolated nucleic acid of the present invention can have a contiguous span of at least 18, 19, 20, 21, 22, 23, 24, 25, 26, 27, 28, 29, or 30 or 40 or 50 nucleotide residues of SEQ ID NO:255 containing the nucleotide variant EX9@351C (nucleotide residue No. 51 in SEQ ID NO:255), or the complements thereof.

[0384] Accordingly, the present invention provides an isolated XRRA1 nucleic acid containing at least one of the newly discovered nucleotide variants as summarized in Table 32, or one or more nucleotide variants that will result in the amino acid variants provided in Table 32. The term “XRRA1 nucleic acid” is as defined above and means a naturally existing nucleic acid coding for a wild-type or variant or mutant XRRA1. The term “XRRA1 nucleic acid” is inclusive and may be in the form of either double-stranded or single-stranded nucleic acids, and a single strand can be either of the two complementing strands. The isolated XRRA1 nucleic acid can be naturally existing genomic DNA, mRNA or cDNA. In one embodiment, the isolated XRRA1 nucleic acid has a nucleotide sequence according to SEQ ID NO:257 but containing one or more exonic nucleotide variants of Table 32 (e.g., EX2@26, EX11@51 and EX13@62), or the complement thereof.

[0385] In another embodiment, the isolated XRRA1 nucleic acid has a nucleotide sequence that is at least 95%, preferably at least 97% and more preferably at least 99% identical to SEQ ID NO:257 but contains one or more exonic nucleotide variants of Table 32, or one or more nucleotide variants that will result in one or more amino acid variants of Table 32, or the complement thereof.

[0386] In yet another embodiment, the isolated XRRA1 nucleic acid has a nucleotide sequence encoding XRRA1 protein having an amino acid sequence according to SEQ ID NO:258 but contains one or more amino acid variants of Table 32. Isolated XRRA1 nucleic acids having a nucleotide sequence that is the complement of the sequence are also encompassed by the present invention.

[0387] In yet another embodiment, the isolated XRRA1 nucleic acid has a nucleotide sequence encoding a XRRA1 protein having an amino acid sequence that is at least 95%, preferably at least 97% and more preferably at least 99% identical to SEQ ID NO:258 but contains one or more amino acid variants of Table 32, or the complement thereof.

[0388] The present invention also provides an isolated nucleic acid, naturally occurring or artificial, having a nucleotide sequence that is at least 95%, preferably at least 97% and more preferably at least 99% identical to SEQ ID NO:257 except for containing one or more nucleotide variants of Table 32, or the complement thereof.

[0389] In another embodiment, the present invention provides an isolated nucleic acid, naturally occurring or artificial, having a nucleotide sequence encoding a XRRA1 protein having an amino acid sequence according to SEQ ID NO:258 but containing one or more amino acid variants of Table 32. Isolated nucleic acids having a nucleotide sequence that is the complement of the sequence are also encompassed by the present invention.

[0390] In addition, isolated nucleic acids are also provided which have a nucleotide sequence encoding a protein having an amino acid sequence that is at least 95%, preferably at least 97% and more preferably at least 99% identical to SEQ ID NO:258 but containing one or more amino acid variants of Table 32, or the complement thereof.

[0391] Also encompassed are isolated XRRA1 nucleic acids obtainable by:

(a) providing a human genomic library;

(b) screening the genomic library using a probe having a nucleotide sequence according to any one of SEQ ID NOs:257, 259-263; and

(c) producing a genomic DNA comprising a contiguous span of at least 30 nucleotides of any one of SEQ ID NOs:257, 259-263, wherein the genomic DNA thus produced contains one or more of the SNPs of the present invention in Table 32.

[0392] The present invention also includes isolated XRRA1 nucleic acids obtainable by:

(i) providing a cDNA library using human mRNA from a human tissue, e.g., blood;

(ii) screening the cDNA library using a probe having a nucleotide sequence according to any one of SEQ ID NOs:257, 259-263; and

(iii) producing a cDNA DNA comprising a contiguous span of at least 30 nucleotides of any one of SEQ ID NOs:257, 259-263, wherein the cDNA thus produced contains one or more of the variants of the present invention in Table 32.

[0393] The present invention also encompasses an isolated nucleic acid comprising the nucleotide sequence of a region of a XRRA1 genomic DNA or cDNA or mRNA, wherein the region contains one or more nucleotide variants as provided in Table 32, or one or more nucleotide variants that will give rise to one or more amino acid variants of Table 32, or the complement thereof. Such regions can be isolated and analyzed to efficiently detect the nucleotide variants of the present invention. Also, such regions can also be isolated and used as probes or primers in detection of the nucleotide variants of the present invention and other uses as will be clear from the descriptions below.

[0394] Thus, in one embodiment, the isolated nucleic acid comprises a contiguous span of at least 12, 15, 17, 18, 19, 20, 21, 22, 23, 24, 25, 26, 27, 28, 29, 30, 40, 50, 70 or 100 nucleotide residues of a XRRA1 nucleic acid, the contiguous span containing one or more nucleotide variants selected from those in Table 32, or the complement thereof. In specific embodiments, the isolated nucleic acids are oligonucleotides having a contiguous span of from about 17, 18, 19, 20, 21, 22, 23 or 25 to about 30, 40 or 50, preferably from about 21 to about 30 nucleotide residues, of any XRRA1 nucleic acid, said contiguous span containing one or more nucleotide variants of Table 32.

[0395] In one embodiment, the isolated nucleic acid comprises a contiguous span of at least 12, 15, 17, 18, 19, 20, 21, 22, 23, 24, 25, 26, 27, 28, 29, 30, 40, 50, 70 or 100 nucleotide residues of any one of SEQ ID NOs:259-263, containing one or more nucleotide variants of Table 32, or the complement thereof. In specific embodiments, the isolated nucleic acid comprises a nucleotide sequence according to any one of SEQ ID NOs:259-263. In preferred embodiments, the isolated nucleic acids are oligonucleotides having a contiguous span of from about 17, 18, 19, 20, 21, 22, 23 or 25 to about 30, 40 or 50, preferably from about 21 to about 30 nucleotide residues, of any one of SEQ ID NOs:259-263 and containing one or more nucleotide variants of Table 32. The complements of the isolated nucleic acids are also encompassed by the present invention.

[0396] Thus, for example, an isolated nucleic acid of the present invention can have a contiguous span of at least 18, 19, 20, 21, 22, 23, 24, 25, 26, 27, 28, 29, or 30 or 40 or 50 nucleotide residues of SEQ ID NO:259 containing the nucleotide variant EX2@26C (nucleotide residue No. 51 in SEQ ID NO:259), or a contiguous span of at least 18, 19, 20, 21, 22, 23, 24, 25, 26, 27, 28, 29, or 30 or 40 or 50 nucleotide residues of SEQ ID NO:261 containing the nucleotide variant EX11@51C (nucleotide residue No. 51 in SEQ ID NO:261), or a contiguous span of at least 18, 19, 20, 21, 22, 23, 24, 25, 26, 27, 28, 29, or 30 or 40 or 50 nucleotide residues of SEQ ID NO:262 containing the nucleotide variant EX13@62C (nucleotide residue No. 51 in SEQ ID NO:262), or the complements thereof.

[0397] The present invention provides an isolated IRF5 nucleic acid containing at least one of the newly discovered nucleotide variants as summarized in Table 33, or one or more nucleotide variants that will result in the amino acid variants provided in Table 1, e.g., EX1@−82m and EX6@91m. The term “IRF5 nucleic acid” is as defined above and means a naturally existing nucleic acid coding for a wild-type or variant or mutant IRF5. The term “IRF5 nucleic acid” is inclusive and may be in the form of either double-stranded or single-stranded nucleic acids, and a single strand can be either of the two complementing strands. The isolated IRF5 nucleic acid can be naturally existing genomic DNA, mRNA or cDNA. In one embodiment, the isolated IRF5 nucleic acid has a nucleotide sequence according to SEQ ID NO:280 but containing one or more exonic nucleotide variants of Table 33 (e.g., EX6@91), or the complement thereof.

[0398] In another embodiment, the isolated IRF5 nucleic acid has a nucleotide sequence that is at least 95%, preferably at least 97% and more preferably at least 99% identical to SEQ ID NO:280 but contains one or more exonic nucleotide variants of Table 33 (e.g., EX6@91), or one or more nucleotide variants that will result in one or more amino acid variants of Table 33, or the complement thereof.

[0399] The present invention also provides an isolated nucleic acid, naturally occurring or artificial, having a nucleotide sequence that is at least 95%, preferably at least 97% and more preferably at least 99% identical to SEQ ID NO:280 except for containing one or more nucleotide variants of Table 33 (e.g., EX6@91), or the complement thereof.

[0400] Also encompassed are isolated IRF5 nucleic acids obtainable by:

(a) providing a human genomic library;

(b) screening the genomic library using a probe having a nucleotide sequence according to any one of SEQ ID NOs:280, 282-290; and

[0401] (c) producing a genomic DNA comprising a contiguous span of at least 30 nucleotides of any one of SEQ ID NOs:280, 282-290, wherein the genomic DNA thus produced contains one or more of the SNPs of the present invention in Table 33, such as EX1@−82m and EX6@91m.

[0402] The present invention also includes isolated IRF5 nucleic acids obtainable by:

(i) providing a cDNA library using human mRNA from a human tissue, e.g., blood;

(ii) screening the cDNA library using a probe having a nucleotide sequence according to any one of SEQ ID NOs:280, 282-290; and

(iii) producing a cDNA DNA comprising a contiguous span of at least 30 nucleotides of any one of SEQ ID NOs:280, 282-290, wherein the cDNA thus produced contains one or more of the SNPs of the present invention in Table 33, such as EX6@91.

[0403] The present invention also encompasses an isolated nucleic acid comprising the nucleotide sequence of a region of a IRF5 genomic DNA or cDNA or mRNA, wherein the region contains one or more nucleotide variants as provided in Table 33 (e.g., EX1@−82m and EX6@91m), or one or more nucleotide variants that will give rise to one or more amino acid variants of Table 33, or the complement thereof. Such regions can be isolated and analyzed to efficiently detect the nucleotide variants of the present invention. Also, such regions can also be isolated and used as probes or primers in detection of the nucleotide variants of the present invention and other uses as will be clear from the descriptions below.

[0404] Thus, in one embodiment, the isolated nucleic acid comprises a contiguous span of at least 12, 15, 17, 18, 19, 20, 21, 22, 23, 24, 25, 26, 27, 28, 29, 30, 40, 50, 70 or 100 nucleotide residues of a IRF5 nucleic acid, the contiguous span containing one or more nucleotide variants of Table 33 (e.g., EX1@−82m and EX6@91m), or the complement thereof. In specific embodiments, the isolated nucleic acid are oligonucleotides having a contiguous span of from about 17, 18, 19, 20, 21, 22, 23 or 25 to about 30, 40 or 50, preferably from about 21 to about 30 nucleotide residues, of any IRF5 nucleic acid, said contiguous span containing one or more nucleotide variants of Table 33 (e.g., EX1@−82m and EX6@91m).

[0405] In one embodiment, the isolated nucleic acid comprises a contiguous span of at least 12, 15, 17, 18, 19, 20, 21, 22, 23, 24, 25, 26, 27, 28, 29, 30, 40, 50, 70 or 100 nucleotide residues of any one of SEQ ID NOs:3-11, containing one or more nucleotide variants of Table 33 (e.g., EX1@−82m and EX6@91m), or the complement thereof. In specific embodiments, the isolated nucleic acid comprises a nucleotide sequence according to any one of SEQ ID NOs:282-290. In preferred embodiments, the isolated nucleic acid are oligonucleotides having a contiguous span of from about 17, 18, 19, 20, 21, 22, 23 or 25 to about 30, 40 or 50, preferably from about 21 to about 30 nucleotide residues, of any one of SEQ ID NOs: 282-290 and containing one or more nucleotide variants of Table 33 (e.g., EX1@−82m and EX6@91m). The complements of the isolated nucleic acids are also encompassed by the present invention.

[0406] Thus, for example, an isolated nucleic acid of the present invention can have a contiguous span of at least 18, 19, 20, 21, 22, 23, 24, 25, 26, 27, 28, 29, or 30 or 40 or 50 nucleotide residues of SEQ ID NO:284 containing the nucleotide variant EX1@−82m (nucleotide residue No. 51 in SEQ ID NO:284), or a contiguous span of at least 18, 19, 20, 21, 22, 23, 24, 25, 26, 27, 28, 29, or 30 or 40 or 50 nucleotide residues of SEQ ID NO:285 containing the nucleotide variant EX6@91m (nucleotide residue No. 51 in SEQ ID NO:285), or the complements thereof.

[0407] The present invention further provides an isolated AMFR nucleic acid containing at least one of the newly discovered nucleotide variants as summarized in Tables 34 and 35, or one or more nucleotide variants that will result in the amino acid variants provided in Tables 34 and 35. The term “AMFR nucleic acid” is as defined above and means a naturally existing nucleic acid coding for a wild-type or variant or mutant AMFR. The term “AMFR nucleic acid” is inclusive and may be in the form of either double-stranded or single-stranded nucleic acids, and a single strand can be either of the two complementing strands. The isolated AMFR nucleic acid can be naturally existing genomic DNA, mRNA or cDNA. In one embodiment, the isolated AMFR nucleic acid has a nucleotide sequence according to SEQ ID NO:291, but containing one or more exonic nucleotide variants of Tables 34 and/or 35, or the complement thereof. In a specific embodiment, the isolated AMFR nucleic acid has a nucleotide sequence according to SEQ ID NO:291 but containing one or more exonic nucleotide variants of Haplotype I in Table 34, or the complement thereof. In another specific embodiment, the isolated AMFR nucleic acid has a nucleotide sequence according to SEQ ID NO:291 except for containing one or more exonic nucleotide variants of Haplotype II in Table 35, or the complement thereof.

[0408] In another embodiment, the isolated AMFR nucleic acid has a nucleotide sequence that is at least 95%, preferably at least 97% and more preferably at least 99% identical to SEQ ID NO:291 but contains one or more exonic nucleotide variants of Table 1, or one or more nucleotide variants that will result in one or more amino acid variants of Tables 34 and/or 35, or the complement thereof.

[0409] In yet another embodiment, the isolated AMFR nucleic acid has a nucleotide sequence encoding AMFR protein having an amino acid sequence according to SEQ ID NO:292 but contains one or more amino acid variants of Tables 34 and/or 35. Isolated AMFR nucleic acids having a nucleotide sequence that is the complement of the sequence are also encompassed by the present invention.

[0410] In yet another embodiment, the isolated AMFR nucleic acid has a nucleotide sequence encoding a AMFR protein having an amino acid sequence that is at least 95%, preferably at least 97% and more preferably at least 99% identical to SEQ ID NO:292 but contains one or more amino acid variants of Tables 34 and/or 35, or the complement thereof.

[0411] The present invention also provides an isolated nucleic acid, naturally occurring or artificial, having a nucleotide sequence that is at least 95%, preferably at least 97% and more preferably at least 99% identical to SEQ ID NO:291 except for containing one or more nucleotide variants of Tables 34 and/or 35, or the complement thereof.

[0412] In another embodiment, the present invention provides an isolated nucleic acid, naturally occurring or artificial, having a nucleotide sequence encoding a AMFR protein having an amino acid sequence according to SEQ ID NO:292 but containing one or more amino acid variants of Tables 34 and/or 35. Isolated nucleic acids having a nucleotide sequence that is the complement of the sequence are also encompassed by the present invention.

[0413] In addition, isolated nucleic acids are also provided which have a nucleotide sequence encoding a protein having an amino acid sequence that is at least 95%, preferably at least 97% and more preferably at least 99% identical to SEQ ID NO:292 but containing one or more amino acid variants of Tables 34 and/or 35, or the complement thereof.

[0414] The present invention also encompasses an isolated nucleic acid comprising the nucleotide sequence of a region of a AMFR genomic DNA or cDNA or mRNA, wherein the region contains one or more nucleotide variants as provided in Tables 34 and/or 35 above, or one or more nucleotide variants that will give rise to one or more amino acid variants of Tables 34 and/or 35, or the complement thereof. Such regions can be isolated and analyzed to efficiently detect the nucleotide variants of the present invention. Also, such regions can also be isolated and used as probes or primers in detection of the nucleotide variants of the present invention and other uses as will be clear from the descriptions below.

[0415] Thus, in one embodiment, the isolated nucleic acid comprises a contiguous span of at least 12, 15, 17, 18, 19, 20, 21, 22, 23, 24, 25, 26, 27, 28, 29, 30, 40, 50, 70 or 100 nucleotide residues of an AMFR nucleic acid, the contiguous span containing one or more nucleotide variants in Tables 34 and/or 35, or the complement thereof. In specific embodiments, the isolated nucleic acid are oligonucleotides having a contiguous span of from about 17, 18, 19, 20, 21, 22, 23 or 25 to about 30, 40 or 50, preferably from about 21 to about 30 nucleotide residues, of any AMFR nucleic acid, said contiguous span containing one or more nucleotide variants of Tables 34 and/or 35.

[0416] In one embodiment, the isolated nucleic acid comprises a contiguous span of at least 12, 15, 17, 18, 19, 20, 21, 22, 23, 24, 25, 26, 27, 28, 29, 30, 40, 50, 70 or 100 nucleotide residues of any one of SEQ ID NOs:295-301, containing one or more nucleotide variants Tables 34-35, or the complement thereof. In specific embodiments, the isolated nucleic acid comprises a nucleotide sequence according to any one of SEQ ID NOs:295-301. In preferred embodiments, the isolated nucleic acid are oligonucleotides having a contiguous span of from about 17, 18, 19, 20, 21, 22, 23 or 25 to about 30, 40 or 50, preferably from about 21 to about 30 nucleotide residues, of any one of SEQ ID NOs:295-301 and containing one or more nucleotide variants of Table 1. The complements of the isolated nucleic acids are also encompassed by the present invention.

[0417] Thus, for example, an isolated nucleic acid of the present invention can have a contiguous span of at least 18, 19, 20, 21, 22, 23, 24, 25, 26, 27, 28, 29, or 30 or 40 or 50 nucleotide residues of SEQ ID NO:295 containing the nucleotide variant EX4@+14C (nucleotide residue No. 51 in SEQ ID NO:295), or a contiguous span of at least 18, 19, 20, 21, 22, 23, 24, 25, 26, 27, 28, 29, or 30 or 40 or 50 nucleotide residues of SEQ ID NO:296 containing the nucleotide variant EX12@+62G (nucleotide residue No. 51 in SEQ ID NO:296), or a contiguous span of at least 18, 19, 20, 21, 22, 23, 24, 25, 26, 27, 28, 29, or 30 or 40 or 50 nucleotide residues of SEQ ID NO:297 containing the nucleotide variant EX14@1359T (nucleotide residue No. 51 in SEQ ID NO:297), or a contiguous span of at least 18, 19, 20, 21, 22, 23, 24, 25, 26, 27, 28, 29, or 30 or 40 or 50 nucleotide residues of SEQ ID NO:298 containing the nucleotide variant EX14@483A (nucleotide residue No. 51, in SEQ ID NO:298), or the complements thereof.

[0418] In preferred embodiments, an isolated oligonucleotide of the present invention is specific to a TLK1, WARS2, ARTS2, MSR, AKAP9, DNAJD1, GOLPH4, RABEP1, TAP2, NARG2, DDX58, CD39, FKBP1a, SRI, XRRA1, IRF5 or AMFR allele (“allele-specific”) containing one or more nucleotide variants as disclosed in the present invention. That is, the isolated oligonucleotide is capable of selectively hybridizing, under high stringency conditions generally recognized in the art, to a TLK1, WARS2, ARTS2, MSR, AKAP9, DNAJD1, GOLPH4, RABEP1, TAP2, NARG2, DDX58, CD39, FKBP1a, SRI, XRRA1, IRF5 or AMFR genomic or cDNA or mRNA containing one or more nucleotide variants as disclosed in the present invention, but not to a TLK1, WARS2, ARTS2, MSR, AKAP9, DNAJD1, GOLPH4, RABEP1, TAP2, NARG2, DDX58, CD39, FKBP1a, SRI, XRRA1, IRF5 or AMFR gene. Such oligonucleotides will be useful in a hybridization-based method for detecting the nucleotide variants of the present invention as described in details below. An ordinarily skilled artisan would recognize various stringent conditions which enable the oligonucleotides of the present invention to differentiate between a TLK1, WARS2, ARTS2, MSR, AKAP9, DNAJD1, GOLPH4, RABEP1, TAP2, NARG2, DDX58, CD39, FKBP1a, SRI, XRRA1, IRF5 or AMFR gene having a reference sequence and a variant TLK1, WARS2, ARTS2, MSR, AKAP9, DNAJD1, GOLPH4, RABEP1, TAP2, NARG2, DDX58, CD39, FKBP1a, SRI, XRRA1, IRF5 or AMFR gene of the present invention. For example, the hybridization can be conducted overnight in a solution containing 50% formamide, 5×SSC, pH7.6, 5× Denhardt's solution, 10% dextran sulfate, and 20 microgram/ml denatured, sheared salmon sperm DNA. The hybridization filters can be washed in 0.1×SSC at about 65° C. Alternatively, typical PCR conditions employed in the art with an annealing temperature of about 55° C. can also be used.

[0419] In the isolated TLK1, WARS2, ARTS2, MSR, AKAP9, DNAJD1, GOLPH4, RABEP1, TAP2, NARG2, DDX58, CD39, FKBP1a, SRI, XRRA1, IRF5 or AMFR oligonucleotides containing a nucleotide variant according to the present invention, the nucleotide variant can be located in any position. In one embodiment, a nucleotide variant is at the 5′ or 3′ end of the oligonucleotides. In a more preferred embodiment, a TLK1, WARS2, ARTS2, MSR, AKAP9, DNAJD1, GOLPH4, RABEP1, TAP2, NARG2, DDX58, CD39, FKBP1a, SRI, XRRA1, IRF5 or AMFR oligonucleotide contains only one nucleotide variant according to the present invention, which is located at the 3′ end of the oligonucleotide. In another embodiment, a nucleotide variant of the present invention is located within no greater than four (4), preferably no greater than three (3), and more preferably no greater than two (2) nucleotides of the center of the oligonucleotide of the present invention. In more preferred embodiment, a nucleotide variant is located at the center or within one (1) nucleotide of the center of the oligonucleotide. For purposes of defining the location of a nucleotide variant in an oligonucleotide, the center nucleotide of an oligonucleotide with an odd number of nucleotides is considered to be the center. For an oligonucleotide with an even number of nucleotides, the bond between the two center nucleotides is considered to be the center.

[0420] In other embodiments of the present invention, isolated nucleic acids are provided which encode a contiguous span of at least 6, 7, 8, 9, 10, 11, 12, 13, 14, 15, 16 or 17 amino acids of an TLK1, WARS2, ARTS2, MSR, AKAP9, DNAJD1, GOLPH4, RABEP1, TAP2, NARG2, DDX58, CD39, FKBP1a, SRI, XRRA1, IRF5 or AMFR protein wherein said contiguous span contains at least one amino acid variant in Tables 1-35 according to the present invention.

[0421] The oligonucleotides of the present invention can have a detectable marker selected from, e.g., radioisotopes, fluorescent compounds, enzymes, or enzyme co-factors operably linked to the oligonucleotide. The oligonucleotides of the present invention can be useful in genotyping as will be apparent from the description below.

[0422] In addition, the present invention also provides DNA microchips or microarray incorporating a variant TLK1, WARS2, ARTS2, MSR, AKAP9, DNAJD1, GOLPH4, RABEP1, TAP2, NARG2, DDX58, CD39, FKBP1a, SRI, XRRA1, IRF5 or AMFR genomic DNA or cDNA or mRNA or an oligonucleotide according to the present invention. The microchip will allow rapid genotyping and/or haplotyping in a large scale.

[0423] As is known in the art, in microchips, a large number of different nucleic acid probes are attached or immobilized in an array on a solid support, e.g., a silicon chip or glass slide. Target nucleic acid sequences to be analyzed can be contacted with the immobilized oligonucleotide probes on the microchip. See Lipshutz et al., Biotechniques, 19:442-447 (1995); Chee et al., Science, 274:610-614 (1996); Kozal et al., Nat. Med. 2:753-759 (1996); Hacia et al., Nat. Genet., 14:441-447 (1996); Saiki et al., Proc. Natl. Acad. Sci. USA, 86:6230-6234 (1989); Gingeras et al., Genome Res., 8:435-448 (1998). The microchip technologies combined with computerized analysis tools allow large-scale high throughput screening. See, e.g., U.S. Pat. No. 5,925,525 to Fodor et al; Wilgenbus et al., J. Mol. Med., 77:761-786 (1999); Graber et al., Curr. Opin. Biotechnol., 9:14-18 (1998); Hacia et al., Nat. Genet., 14:441-447 (1996); Shoemaker et al., Nat. Genet., 14:450-456 (1996); DeRisi et al., Nat. Genet., 14:457-460 (1996); Chee et al., Nat. Genet., 14:610-614 (1996); Lockhart et al., Nat. Genet., 14:675-680 (1996); Drobyshev et al., Gene, 188:45-52 (1997).

[0424] In a preferred embodiment, a DNA microchip is provided comprising a plurality of the oligonucleotides of the present invention such that the nucleotide identity at each of the nucleotide variant sites disclosed in Tables 1-35 can be determined in one single microarray. In a preferred embodiment, the microchip incorporates a variant TLK1, WARS2, ARTS2, MSR, AKAP9, DNAJD1, GOLPH4, RABEP1, TAP2, NARG2, DDX58, CD39, FKBP1a, SRI, XRRA1, IRF5 or AMFR nucleic acid or oligonucleotide of the present invention and contains at least two of the variants in Tables 1-35 and 81, preferably at least ten, more preferably at least 20, 30, 40, 50, or 100 of the variants in Table 1-35 and 81.

[0425] In one embodiment, the DNA microchip is designed to detect at least one nucleotide variant associated with a high or low expression phenotype of at least two, preferably at least 3, 4, 5, 6, 7, 8, 9, 10, 11, 12, 13, 14 or at least 15 of the genes chosen from the group of TLK1, WARS2, ARTS2, MSR, AKAP9, DNAJD1, RABEP1, TAP2, DDX58, FKBP1a, SRI, XRRA1, and AMFR. Preferably such a microchip is designed to detect at least one nucleotide variant associated with a high expression phenotype and at least one nucleotide variant associated with a low expression phenotype of at least two, preferably at least 3, 4, 5, 6, 7, 8, 9, 10, 11, 12, 13, 14 or at least 15 of the genes chosen from the group of TLK1, WARS2, ARTS2, MSR, AKAP9, DNAJD1, RABEP1, TAP2, DDX58, FKBP1a, SRI, XRRA1, and AMFR. Such microchips can be used in diagnostic or prognostic or pharmacogenetic response assays related to cancer. Such variants are according to the present invention selected from those in Tables 1-35 and 81. The variants can be contained in nucleic acids, particularly oligonucleotides in the DNA microchip.

### 4. Proteins and Peptides

[0426] In one aspect, the present invention provides an isolated ARTS1 protein encoded by one of the novel ARTS1 gene variants according to the present invention. Thus, for example, the present invention provides an isolated ARTS1 protein having an amino acid sequence according to SEQ ID NO:31 but containing one or more amino acid variants selected from the group consisting of P127R and Q725R. In another example, the isolated ARTS1 protein of the present invention has an amino acid sequence at least 95%, preferably 97%, more preferably 99% identical to SEQ ID NO:31 wherein the amino acid sequence contains at least one amino acid variant selected from the group consisting of P127R and Q725R.

[0427] In addition, the present invention also encompasses isolated peptides having a contiguous span of at least 6, 7, 8, 9, 10, 11, 12, 13, 15, 17, 19 or 21 or more amino acids of an isolated ARTS1 protein of the present invention said contiguous span encompassing one or more amino acid variants selected from the group consisting of P127R and Q725R. In preferred embodiments, the isolated variant ARTS1 peptides contain no greater than 200 or 100 amino acids, and preferably no greater than 50 amino acids. In specific embodiments, the ARTS1 polypeptides in accordance with the present invention contain one or more of the amino acid variants identified in accordance with the present invention. The peptides can be useful in preparing antibodies specific to the mutant ARTS1 proteins provided in accordance with the present invention.

[0428] Thus, as an example, an isolated polypeptide of the present invention can have a contiguous span of at least 6, 7, 8, 9, 10, 11, 12, 13, 14 or 15 amino acid residues of SEQ ID NO:31 encompassing the amino acid variant P127R (amino acid residue No. 127 in SEQ ID NO:31), or a contiguous span of at least 6, 7, 8, 9, 10, 11, 12, 13, 14 or 15 amino acid residues of SEQ ID NO:31 encompassing the amino acid variant Q725R (amino acid residue No. 725 in SEQ ID NO:31).

[0429] In another aspect, the present invention provides an isolated MSR protein encoded by one of the novel MSR gene variants according to the present invention. Thus, for example, the present invention provides an isolated MSR protein having an amino acid sequence according to SEQ ID NO:67 but containing one or more amino acid variants selected from the group consisting of K350R or H595Y. In another example, the isolated MSR protein of the present invention has an amino acid sequence at least 95%, preferably 97%, more preferably 99% identical to SEQ ID NO:67 wherein the amino acid sequence contains at least one amino acid variant selected from the group consisting of K350R or H595Y.

[0430] In addition, the present invention also encompasses isolated peptides having a contiguous span of at least 6, 7, 8, 9, 10, 11, 12, 13, 15, 17, 19 or 21 or more amino acids of an isolated MSR protein of the present invention said contiguous span encompassing one or more amino acid variants selected from the group consisting of K350R or H595Y. In preferred embodiments, the isolated variant MSR peptides contain no greater than 200 or 100 amino acids, and preferably no greater than 50 amino acids. In specific embodiments, the MSR polypeptides in accordance with the present invention contain one or more of the amino acid variants identified in accordance with the present invention. The peptides can be useful in preparing antibodies specific to the mutant MSR proteins provided in accordance with the present invention.

[0431] Thus, as an example, an isolated polypeptide of the present invention can have a contiguous span of at least 6, 7, 8, 9, 10, 11, 12, 13, 14 or 15 amino acid residues of SEQ ID NO:67 encompassing the amino acid variant H595Y (amino acid residue No. 595 in SEQ ID NO:67), or encompassing the amino acid variant K350R (amino acid residue No. 350 in SEQ ID NO:67).

[0432] The present invention also provides isolated proteins encoded by one of the isolated nucleic acids according to the present invention. In one aspect, the present invention provides an isolated AKAP9 protein encoded by one of the novel AKAP9 gene variants according to the present invention. Thus, for example, the present invention provides an isolated AKAP9 protein having an amino acid sequence according to SEQ ID NO:91 but containing one or more amino acid variants selected from the group consisting of N2792S and M463I. In another example, the isolated AKAP9 protein of the present invention has an amino acid sequence at least 95%, preferably 97%, more preferably 99% identical to SEQ ID NO:91 wherein the amino acid sequence contains at least one amino acid variant selected from the group consisting of N2792S and M463I.

[0433] In addition, the present invention also encompasses isolated peptides having a contiguous span of at least 6, 7, 8, 9, 10, 11, 12, 13, 15, 17, 19 or 21 or more amino acids of an isolated AKAP9 protein of the present invention said contiguous span encompassing one or more amino acid variants selected from the group consisting of N2792S and M463I. In preferred embodiments, the isolated variant AKAP9 peptides contain no greater than 200 or 100 amino acids, and preferably no greater than 50 amino acids. In specific embodiments, the AKAP9 polypeptides in accordance with the present invention contain one or more of the amino acid variants identified in accordance with the present invention. The peptides can be useful in preparing antibodies specific to the mutant AKAP9 proteins provided in accordance with the present invention.

[0434] Thus, as an example, an isolated polypeptide of the present invention can have a contiguous span of at least 6, 7, 8, 9, 10, 11, 12, 13, 14 or 15 amino acid residues of SEQ ID NO:91 encompassing the amino acid variant M463I (amino acid residue No. 463 in SEQ ID NO:91), or a contiguous span of at least 6, 7, 8, 9, 10, 11, 12, 13, 14 or 15 amino acid residues of SEQ ID NO:91 encompassing the amino acid variant N2792S (amino acid residue No. 2792 in SEQ ID NO:91).

[0435] In another aspect, the present invention provides an isolated DNAJD1 protein encoded by one of the novel DNAJD1 gene variants according to the present invention. Thus, for example, the present invention provides an isolated DNAJD1 protein having an amino acid sequence according to SEQ ID NO:150 but containing the amino acid variant R35G. In another example, the isolated DNAJD1 protein of the present invention has an amino acid sequence at least 95%, preferably 97%, more preferably 99% identical to SEQ ID NO:150 wherein the amino acid sequence contains the amino acid variant R35G.

[0436] In addition, the present invention also encompasses isolated peptides having a contiguous span of at least 6, 7, 8, 9, 10, 11, 12, 13, 15, 17, 19 or 21 or more amino acids of an isolated DNAJD1 protein of the present invention said contiguous span encompassing the amino acid variant R35G. In preferred embodiments, the isolated variant DNAJD1 peptides contain no greater than 200 or 100 amino acids, and preferably no greater than 50 amino acids. In specific embodiments, the DNAJD1 polypeptides in accordance with the present invention contain the amino acid variant identified in accordance with the present invention. The peptides can be useful in preparing antibodies specific to the mutant DNAJD1 proteins provided in accordance with the present invention.

[0437] Thus, as an example, an isolated polypeptide of the present invention can have a contiguous span of at least 6, 7, 8, 9, 10, 11, 12, 13, 14 or 15 amino acid residues of SEQ ID NO:150 encompassing the amino acid variant R35G (amino acid residue No. 35 in SEQ ID NO:150).

[0438] In yet another aspect, the present invention provides an isolated TAP2 protein encoded by one of the novel TAP2 gene variants according to the present invention. Thus, for example, the present invention provides an isolated TAP2 protein having an amino acid sequence according to SEQ ID NO:203 but containing one or more amino acid variants selected from the group consisting of A665T and R651C. In another example, the isolated TAP2 protein of the present invention has an amino acid sequence at least 95%, preferably 97%, more preferably 99% identical to SEQ ID NO:203 wherein the amino acid sequence contains at least one amino acid variant selected from the group consisting of R651C and A665T.

[0439] In addition, the present invention also encompasses isolated peptides having a contiguous span of at least 6, 7, 8, 9, 10, 11, 12, 13, 15, 17, 19 or 21 or more amino acids of an isolated TAP2 protein of the present invention said contiguous span encompassing one or more amino acid variants selected from the group consisting of R651C and A665T. In preferred embodiments, the isolated variant TAP2 peptides contain no greater than 200 or 100 amino acids, and preferably no greater than 50 amino acids. In specific embodiments, the TAP2 polypeptides in accordance with the present invention contain one or more of the amino acid variants identified in accordance with the present invention. The peptides can be useful in preparing antibodies specific to the mutant TAP2 proteins provided in accordance with the present invention.

[0440] Thus, as an example, an isolated polypeptide of the present invention can have a contiguous span of at least 6, 7, 8, 9, 10, 11, 12, 13, 14 or 15 amino acid residues of SEQ ID NO:203 encompassing the amino acid variant R651C (amino acid residue No. 651 in SEQ ID NO:203), or a contiguous span of at least 6, 7, 8, 9, 10, 11, 12, 13, 14 or 15 amino acid residues of SEQ ID NO:203 encompassing the amino acid variant A665T (amino acid residue No. 665 in SEQ ID NO:195).

[0441] The present invention also provides isolated proteins encoded by one of the isolated nucleic acids according to the present invention. In one aspect, the present invention provides an isolated XRRA1 protein encoded by one of the novel XRRA1 gene variants according to the present invention. Thus, for example, the present invention provides an isolated XRRA1 protein having an amino acid sequence according to SEQ ID NO:258 but containing one or more amino acid variants selected from the group consisting of P38R and T502R. In another example, the isolated XRRA1 protein of the present invention has an amino acid sequence at least 95%, preferably 97%, more preferably 99% identical to SEQ ID NO:258 wherein the amino acid sequence contains at least one amino acid variant selected from the group consisting of P38R and T502R.

[0442] In addition, the present invention also encompasses isolated peptides having a contiguous span of at least 6, 7, 8, 9, 10, 11, 12, 13, 15, 17, 19 or 21 or more amino acids of an isolated XRRA1 protein of the present invention said contiguous span encompassing one or more amino acid variants selected from the group consisting of P38R and T502R. In preferred embodiments, the isolated variant XRRA1 peptides contain no greater than 200 or 100 amino acids, and preferably no greater than 50 amino acids. In specific embodiments, the XRRA1 polypeptides in accordance with the present invention contain one or more of the amino acid variants identified in accordance with the present invention. The peptides can be useful in preparing antibodies specific to the mutant XRRA1 proteins provided in accordance with the present invention.

[0443] Thus, as an example, an isolated polypeptide of the present invention can have a contiguous span of at least 6, 7, 8, 9, 10, 11, 12, 13, 14 or 15 amino acid residues of SEQ ID NO:258 encompassing the amino acid variant P38R (amino acid residue No. 38 in SEQ ID NO:258), or a contiguous span of at least 6, 7, 8, 9, 10, 11, 12, 13, 14 or 15 amino acid residues of SEQ ID NO:258 encompassing the amino acid variant T502R (amino acid residue No. 502 in SEQ ID NO:258).

[0444] As will be apparent to an ordinarily skilled artisan, the isolated nucleic acids and isolated polypeptides of the present invention can be prepared using techniques generally known in the field of molecular biology. See generally, Sambrook et al., Molecular Cloning: A Laboratory Manual, 2^{nd} ed., Cold Spring Harbor Laboratory, Cold Spring Harbor, N.Y., 1989. The isolated ARTS2, MSR, AKAP9, DNAJD1, TAP2, or XRRA1 gene or cDNA or oligonucleotides of this invention can be operably linked to one or more other DNA fragments. For example, the isolated ARTS2, MSR, AKAP9, DNAJD1, TAP2, or XRRA1 nucleic acid (e.g., cDNA or oligonucleotides) can be ligated to another DNA such that a fusion protein can be encoded by the ligation product. The isolated ARTS2, MSR, AKAP9, DNAJD1, TAP2, or XRRA1 nucleic acid (e.g., cDNA or oligonucleotides) can also be incorporated into a DNA vector for purposes of, e.g., amplifying the nucleic acid or a portion thereof, and/or expressing a mutant ARTS2, MSR, AKAP9, DNAJD1, TAP2, or XRRA1 polypeptide or a fusion protein thereof.

[0445] Thus, the present invention also provides a vector construct containing an isolated nucleic acid of the present invention, such as a mutant ARTS2, MSR, AKAP9, DNAJD1, TAP2, or XRRA1 nucleic acid (e.g., cDNA or oligonucleotides) of the present invention. Generally, the vector construct may include a promoter operably linked to a DNA of interest (including a full-length sequence or a fragment thereof in the 5′ to 3′ direction or in the reverse direction for purposes of producing antisense nucleic acids), an origin of DNA replication for the replication of the vector in host cells and a replication origin for the amplification of the vector in, e.g., E. coli, and selection marker(s) for selecting and maintaining only those host cells harboring the vector. Additionally, the vector preferably also contains inducible elements, which function to control the expression of the isolated gene sequence. Other regulatory sequences such as transcriptional termination sequences and translation regulation sequences (e.g., Shine-Dalgarno sequence) can also be included. An epitope tag-coding sequence for detection and/or purification of the encoded polypeptide can also be incorporated into the vector construct. Examples of useful epitope tags include, but are not limited to, influenza virus hemagglutinin (HA), Simian Virus 5 (V5), polyhistidine (6xHis), c-myc, lacZ, GST, and the like. Proteins with polyhistidine tags can be easily detected and/or purified with Ni affinity columns, while specific antibodies to many epitope tags are generally commercially available. The vector construct can be introduced into the host cells or organisms by any techniques known in the art, e.g., by direct DNA transformation, microinjection, electroporation, viral infection, lipofection, gene gun, and the like. The vector construct can be maintained in host cells in an extrachromosomal state, i.e., as self-replicating plasmids or viruses. Alternatively, the vector construct can be integrated into chromosomes of the host cells by conventional techniques such as selection of stable cell lines or site-specific recombination. The vector construct can be designed to be suitable for expression in various host cells, including but not limited to bacteria, yeast cells, plant cells, insect cells, and mammalian and human cells. A skilled artisan will recognize that the designs of the vectors can vary with the host cell used.

### 5. Antibodies

[0446] The present invention also provides antibodies selectively immunoreactive with a variant ARTS2, MSR, AKAP9, DNAJD1, TAP2, or XRRA1 protein or peptide provided in accordance with the present invention and methods for making the antibodies. As used herein, the term “antibody” encompasses both monoclonal and polyclonal antibodies that fall within any antibody classes, e.g., IgG, IgM, IgA, etc. The term “antibody” also means antibody fragments including, but not limited to, Fab and F(ab′)₂, conjugates of such fragments, and single-chain antibodies that can be made in accordance with U.S. Pat. No. 4,704,692, which is incorporated herein by reference. Specifically, the phrase “selectively immunoreactive with one or more of the newly discovered variant ARTS2, MSR, AKAP9, DNAJD1, TAP2, or XRRA1 protein variants” as used herein means that the immunoreactivity of an antibody with a protein variant of the present invention is substantially higher than that with the ARTS2, MSR, AKAP9, DNAJD1, TAP2, or XRRA1 protein heretofore known in the art such that the binding of the antibody to the protein variant of the present invention is readily distinguishable, based on the strength of the binding affinities, from the binding of the antibody to the ARTS2, MSR, AKAP9, DNAJD1, TAP2, or XRRA1 protein having a reference amino acid sequence. Preferably, the binding constant differs by a magnitude of at least 2 fold, more preferably at least 5 fold, even more preferably at least 10 fold, and most preferably at least 100 fold.

[0447] To make such an antibody, a variant ARTS2, MSR, AKAP9, DNAJD1, TAP2, or XRRA1 protein or a peptide of the present invention having a particular amino acid variant (e.g., substitution or insertion or deletion) is provided and used to immunize an animal. The variant ARTS2, MSR, AKAP9, DNAJD1, TAP2, or XRRA1 protein or peptide variant can be made by any methods known in the art, e.g., by recombinant expression or chemical synthesis. To increase the specificity of the antibody, a shorter peptide containing an amino acid variant is preferably generated and used as antigen. Techniques for immunizing animals for the purpose of making polyclonal antibodies are generally known in the art. See Harlow and Lane, Antibodies: A Laboratory Manual, Cold Spring Harbor Laboratory, Cold Spring Harbor, N.Y., 1988. A carrier may be necessary to increase the immunogenicity of the polypeptide. Suitable carriers known in the art include, but are not limited to, liposome, macromolecular protein or polysaccharide, or combination thereof. Preferably, the carrier has a molecular weight in the range of about 10,000 to 1,000,000. The polypeptide may also be administered along with an adjuvant, e.g., complete Freund's adjuvant.

[0448] The antibodies of the present invention preferably are monoclonal. Such monoclonal antibodies may be developed using any conventional techniques known in the art. For example, the popular hybridoma method disclosed in Kohler and Milstein, Nature, 256:495-497 (1975) is now a well-developed technique that can be used in the present invention. See U.S. Pat. No. 4,376,110, which is incorporated herein by reference. Essentially, B-lymphocytes producing a polyclonal antibody against a protein variant of the present invention can be fused with myeloma cells to generate a library of hybridoma clones. The hybridoma population is then screened for antigen binding specificity and also for immunoglobulin class (isotype). In this manner, pure hybridoma clones producing specific homogenous antibodies can be selected. See generally, Harlow and Lane, Antibodies: A Laboratory Manual, Cold Spring Harbor Press, 1988. Alternatively, other techniques known in the art may also be used to prepare monoclonal antibodies, which include but are not limited to the EBV hybridoma technique, the human N-cell hybridoma technique, and the trioma technique.

[0449] In addition, antibodies selectively immunoreactive with a protein or peptide variant of the present invention may also be recombinantly produced. For example, cDNAs prepared by PCR amplification from activated B-lymphocytes or hybridomas may be cloned into an expression vector to form a cDNA library, which is then introduced into a host cell for recombinant expression. The cDNA encoding a specific protein may then be isolated from the library. The isolated cDNA can be introduced into a suitable host cell for the expression of the protein. Thus, recombinant techniques can be used to recombinantly produce specific native antibodies, hybrid antibodies capable of simultaneous reaction with more than one antigen, chimeric antibodies (e.g., the constant and variable regions are derived from different sources), univalent antibodies which comprise one heavy and light chain pair coupled with the Fc region of a third (heavy) chain, Fab proteins, and the like. See U.S. Pat. No. 4,816,567; European Patent Publication No. 0088994; Munro, Nature, 312:597 (1984); Morrison, Science, 229:1202 (1985); Oi et al., BioTechniques, 4:214 (1986); and Wood et al., Nature, 314:446-449 (1985), all of which are incorporated herein by reference. Antibody fragments such as Fv fragments, single-chain Fv fragments (scFv), Fab′ fragments, and F(ab′)₂ fragments can also be recombinantly produced by methods disclosed in, e.g., U.S. Pat. No. 4,946,778; Skerra & Plückthun, Science, 240:1038-1041 (1988); Better et al., Science, 240:1041-1043 (1988); and Bird, et al., Science, 242:423-426 (1988), all of which are incorporated herein by reference.

[0450] In a preferred embodiment, the antibodies provided in accordance with the present invention are partially or fully humanized antibodies. For this purpose, any methods known in the art may be used. For example, partially humanized chimeric antibodies having V regions derived from the tumor-specific mouse monoclonal antibody, but human C regions are disclosed in Morrison and Oi, Adv. Immunol., 44:65-92 (1989). In addition, fully humanized antibodies can be made using transgenic non-human animals. For example, transgenic non-human animals such as transgenic mice can be produced in which endogenous immunoglobulin genes are suppressed or deleted, while heterologous antibodies are encoded entirely by exogenous immunoglobulin genes, preferably human immunoglobulin genes, recombinantly introduced into the genome. See e.g., U.S. Pat. Nos. 5,530,101; 5,545,806; 6,075,181; PCT Publication No. WO 94/02602; Green et. al., Nat. Genetics, 7: 13-21 (1994); and Lonberg et al., Nature 368: 856-859 (1994), all of which are incorporated herein by reference. The transgenic non-human host animal may be immunized with suitable antigens such as a protein variant of the present invention to illicit a specific immune response thus producing humanized antibodies. In addition, cell lines producing specific humanized antibodies can also be derived from the immunized transgenic non-human animals. For example, mature B-lymphocytes obtained from a transgenic animal producing humanized antibodies can be fused to myeloma cells and the resulting hybridoma clones may be selected for specific humanized antibodies with desired binding specificities. Alternatively, cDNAs may be extracted from mature B-lymphocytes and used in establishing a library which is subsequently screened for clones encoding humanized antibodies with desired binding specificities.

[0451] In a specific embodiment, the antibody is selectively immunoreactive with a variant ARTS1 protein or peptide containing the amino acid variant P127R and/or Q725R.

[0452] In another specific embodiment, the antibody is selectively immunoreactive with a variant MSR protein or peptide containing the amino acid variant K350R and/or H595Y.

[0453] In another specific embodiment, the antibody is selectively immunoreactive with a variant AKAP9 protein or peptide containing the amino acid variant N2792S and/or M463I.

[0454] In another specific embodiment, the antibody is selectively immunoreactive with a variant DNAJD1 protein or peptide containing the amino acid variant R35G.

[0455] In yet another specific embodiment, the antibody is selectively immunoreactive with a variant TAP2 protein or peptide containing the amino acid variant R651C and/or T665A.

[0456] In yet another specific embodiment, the antibody is selectively immunoreactive with a variant XRRA1 protein or peptide containing the amino acid variant P38R and/or T502R.

### 6. Genotyping

[0457] The present invention provides methods for genotyping the TLK1, WARS2, ARTS2, MSR, AKAP9, DNAJD1, GOLPH4, RABEP1, TAP2, NARG2, DDX58, CD39, FKBP1a, SRI, XRRA1, IRF5 and AMFR genes by determining whether an individual, or a tissue sample from an individual, has a nucleotide variant or amino acid variant of the present invention.

[0458] Similarly, methods for haplotyping the TLK1, WARS2, ARTS2, MSR, AKAP9, DNAJD1, GOLPH4, RABEP1, TAP2, NARG2, DDX58, CD39, FKBP1a, SRI, XRRA1, IRF5 and AMFR genes are also provided. Haplotyping can be done by any methods known in the art. For example, only one copy of the TLK1, WARS2, ARTS2, MSR, AKAP9, DNAJD1, GOLPH4, RABEP1, TAP2, NARG2, DDX58, CD39, FKBP1a, SRI, XRRA1, IRF5 or AMFR gene can be isolated from an individual, or from a tissue sample from an individual, and the nucleotide at each of the variant positions is determined. Alternatively, an allele specific PCR or a similar method can be used to amplify only one copy of the TLK1, WARS2, ARTS2, MSR, AKAP9, DNAJD1, GOLPH4, RABEP1, TAP2, NARG2, DDX58, CD39, FKBP1a, SRI, XRRA1, IRF5 or AMFR gene in an individual, or the tissue sample, and the SNPs at the variant positions of the present invention are determined. The Clark method known in the art can also be employed for haplotyping. A high throughput molecular haplotyping method is also disclosed in Tost et al., Nucleic Acids Res., 30(19):e96 (2002), which is incorporated herein by reference.

[0459] Thus, additional variant(s) that are in linkage disequilibrium with the variants and/or haplotypes of the present invention can be identified by a haplotyping method known in the art, as will be apparent to a skilled artisan in the field of genetics and haplotying. The additional variants that are in linkage disequilibrium with a variant or haplotype of the present invention can also be useful in the various applications as described below.

[0460] For purposes of genotyping and haplotyping, both genomic DNA and mRNA/cDNA can be used, and both are herein referred to generically as “gene.”

[0461] Numerous techniques for detecting nucleotide variants are known in the art and can all be used for the method of this invention. The techniques can be protein-based or DNA-based. In either case, the techniques used must be sufficiently sensitive so as to accurately detect the small nucleotide or amino acid variations. Very often, a probe is utilized which is labeled with a detectable marker. Unless otherwise specified in a particular technique described below, any suitable marker known in the art can be used, including but not limited to, radioactive isotopes, fluorescent compounds, biotin which is detectable using strepavidin, enzymes (e.g., alkaline phosphatase), substrates of an enzyme, ligands and antibodies, etc. See Jablonski et al., Nucleic Acids Res., 14:6115-6128 (1986); Nguyen et al., Biotechniques, 13:116-123 (1992); Rigby et al., J. Mol. Biol., 113:237-251 (1977).

[0462] In a DNA-based detection method, a target DNA sample, i.e., a sample containing TLK1, WARS2, ARTS2, MSR, AKAP9, DNAJD1, GOLPH4, RABEP1, TAP2, NARG2, DDX58, CD39, FKBP1a, SRI, XRRA1, IRF5 or AMFR genomic DNA or cDNA or mRNA must be obtained from the individual to be tested, or from a tissue sample from the individual to be tested. Any tissue or cell sample containing the TLK1, WARS2, ARTS2, MSR, AKAP9, DNAJD1, GOLPH4, RABEP1, TAP2, NARG2, DDX58, CD39, FKBP1a, SRI, XRRA1, IRF5 or AMFR genomic DNA, mRNA, or cDNA or a portion thereof can be used. However, in situations where the individual to be tested is thought or known to have cancer, a tissue sample may preferentially be obtained from the cancerous growth or tumor by biopsy. In such situations, it may be important to ensure that the biopsy sample is primarily composed of cancerous cells, since it may be advantageous to specifically genotype the cancerous growth or tumor, instead of, or in addition to, the somatic tissues of the individual being tested. For all genotyping methods, a tissue sample containing cell nucleus and thus genomic DNA can be obtained from the individual or from the cancerous growth or tumor within the individual. For genotyping somatic tissues, blood samples can be useful, except that only white blood cells and other lymphocytes have cell nuclei, while red blood cells are anucleate and contain only mRNA. Nevertheless, mRNA is also useful as it can be analyzed for the presence of nucleotide variants in its sequence or serve as template for cDNA synthesis. The tissue or cell samples, whether from the somatic tissues of an individual, or from a biopsy of a cancerous growth or tumor, can be analyzed directly without much processing. Alternatively, nucleic acids including the target sequence can be extracted, purified, and/or amplified before they are subject to the various detecting procedures discussed below. Other than tissue or cell samples, cDNAs or genomic DNAs from a cDNA or genomic DNA library constructed using a tissue or cell sample obtained from the individual to be tested, or from a biopsy of a cancerous growth or tumor from an individual, are also useful.

[0463] To determine the presence or absence of a particular nucleotide variant, one technique is simply sequencing the target genomic DNA or cDNA, particularly the region encompassing the nucleotide variant locus to be detected. Various sequencing techniques are generally known and widely used in the art including the Sanger method and Gilbert chemical method. The newly developed pyrosequencing method monitors DNA synthesis in real time using a luminometric detection system. Pyrosequencing has been shown to be effective in analyzing genetic polymorphisms such as single-nucleotide polymorphisms and thus can also be used in the present invention. See Nordstrom et al., Biotechnol. Appl. Biochem., 31(2):107-112 (2000); Ahmadian et al., Anal. Biochem., 280:103-110 (2000).

[0464] Alternatively, the restriction fragment length polymorphism (RFLP) and AFLP method may also prove to be useful techniques. In particular, if a nucleotide variant in the target TLK1, WARS2, ARTS2, MSR, AKAP9, DNAJD1, GOLPH4, RABEP1, TAP2, NARG2, DDX58, CD39, FKBP1a, SRI, XRRA1, IRF5 or AMFR DNA results in the elimination or creation of a restriction enzyme recognition site, then digestion of the target DNA with that particular restriction enzyme will generate an altered restriction fragment length pattern. Thus, a detected RFLP or AFLP will indicate the presence of a particular nucleotide variant.

[0465] Another useful approach is the single-stranded conformation polymorphism assay (SSCA), which is based on the altered mobility of a single-stranded target DNA spanning the nucleotide variant of interest. A single nucleotide change in the target sequence can result in different intramolecular base pairing pattern, and thus different secondary structure of the single-stranded DNA, which can be detected in a non-denaturing gel. See Orita et al., Proc. Natl. Acad. Sci. USA, 86:2776-2770 (1989). Denaturing gel-based techniques such as clamped denaturing gel electrophoresis (CDGE) and denaturing gradient gel electrophoresis (DGGE) detect differences in migration rates of mutant sequences as compared to wild-type sequences in denaturing gel. See Miller et al., Biotechniques, 5:1016-24 (1999); Sheffield et al., Am. J. Hum, Genet., 49:699-706 (1991); Wartell et al., Nucleic Acids Res., 18:2699-2705 (1990); and Sheffield et al., Proc. Natl. Acad. Sci. USA, 86:232-236 (1989). In addition, the double-strand conformation analysis (DSCA) can also be useful in the present invention. See Arguello et al., Nat. Genet., 18:192-194 (1998).

[0466] The presence or absence of a nucleotide variant at a particular locus in the TLK1, WARS2, ARTS2, MSR, AKAP9, DNAJD1, GOLPH4, RABEP1, TAP2, NARG2, DDX58, CD39, FKBP1a, SRI, XRRA1, IRF5 or AMFR gene of an individual can also be detected using the amplification refractory mutation system (ARMS) technique. See e.g., European Patent No. 0,332,435; Newton et al., Nucleic Acids Res., 17:2503-2515 (1989); Fox et al., Br. J. Cancer, 77:1267-1274 (1998); Robertson et al., Eur. Respir. J, 12:477-482 (1998). In the ARMS method, a primer is synthesized matching the nucleotide sequence immediately 5′ upstream from the locus being tested except that the 3′-end nucleotide which corresponds to the nucleotide at the locus is a predetermined nucleotide. For example, the 3′-end nucleotide can be the same as that in the mutated locus. The primer can be of any suitable length so long as it hybridizes to the target DNA under stringent conditions only when its 3′-end nucleotide matches the nucleotide at the locus being tested. Preferably the primer has at least 12 nucleotides, more preferably from about 18 to 50 nucleotides. If the individual tested has a mutation at the locus and the nucleotide therein matches the 3′-end nucleotide of the primer, then the primer can be further extended upon hybridizing to the target DNA template, and the primer can initiate a PCR amplification reaction in conjunction with another suitable PCR primer. In contrast, if the nucleotide at the locus is of wild type, then primer extension cannot be achieved. Various forms of ARMS techniques developed in the past few years can be used. See e.g., Gibson et al., Clin. Chem. 43:1336-1341 (1997).

[0467] Similar to the ARMS technique is the mini sequencing or single nucleotide primer extension method, which is based on the incorporation of a single nucleotide. An oligonucleotide primer matching the nucleotide sequence immediately 5′ to the locus being tested is hybridized to the target DNA or mRNA in the presence of labeled dideoxyribonucleotides. A labeled nucleotide is incorporated or linked to the primer only when the dideoxyribonucleotides matches the nucleotide at the variant locus being detected. Thus, the identity of the nucleotide at the variant locus can be revealed based on the detection label attached to the incorporated dideoxyribonucleotides. See Syvanen et al., Genomics, 8:684-692 (1990); Shumaker et al., Hum. Mutat., 7:346-354 (1996); Chen et al., Genome Res., 10:549-547 (2000).

[0468] Another set of techniques useful in the present invention is the so-called “oligonucleotide ligation assay” (OLA) in which differentiation between a wild-type locus and a mutation is based on the ability of two oligonucleotides to anneal adjacent to each other on the target DNA molecule allowing the two oligonucleotides joined together by a DNA ligase. See Landergren et al., Science, 241:1077-1080 (1988); Chen et al, Genome Res., 8:549-556 (1998); Iannone et al., Cytometry, 39:131-140 (2000). Thus, for example, to detect a single-nucleotide mutation at a particular locus in the TLK1, WARS2, ARTS2, MSR, AKAP9, DNAJD1, GOLPH4, RABEP1, TAP2, NARG2, DDX58, CD39, FKBP1a, SRI, XRRA1, IRF5 or AMFR gene, two oligonucleotides can be synthesized, one having the TLK1, WARS2, ARTS2, MSR, AKAP9, DNAJD1, GOLPH4, RABEP1, TAP2, NARG2, DDX58, CD39, FKBP1a, SRI, XRRA1, IRF5 or AMFR sequence just 5′ upstream from the locus with its 3′ end nucleotide being identical to the nucleotide in the variant locus of the TLK1, WARS2, ARTS2, MSR, AKAP9, DNAJD1, GOLPH4, RABEP1, TAP2, NARG2, DDX58, CD39, FKBP1a, SRI, XRRA1, IRF5 or AMFR gene, the other having a nucleotide sequence matching the TLK1, WARS2, ARTS2, MSR, AKAP9, DNAJD1, GOLPH4, RABEP1, TAP2, NARG2, DDX58, CD39, FKBP1a, SRI, XRRA1, IRF5 or AMFR sequence immediately 3′ downstream from the locus in the TLK1, WARS2, ARTS2, MSR, AKAP9, DNAJD1, GOLPH4, RABEP1, TAP2, NARG2, DDX58, CD39, FKBP1a, SRI, XRRA1, IRF5 or AMFR gene. The oligonucleotides can be labeled for the purpose of detection. Upon hybridizing to the target TLK1, WARS2, ARTS2, MSR, AKAP9, DNAJD1, GOLPH4, RABEP1, TAP2, NARG2, DDX58, CD39, FKBP1a, SRI, XRRA1, IRF5 or AMFR gene under a stringent condition, the two oligonucleotides are subject to ligation in the presence of a suitable ligase. The ligation of the two oligonucleotides would indicate that the target DNA has a nucleotide variant at the locus being detected.

[0469] Detection of small genetic variations can also be accomplished by a variety of hybridization-based approaches. Allele-specific oligonucleotides are most useful. See Conner et al., Proc. Natl. Acad. Sci. USA, 80:278-282 (1983); Saiki et al, Proc. Natl. Acad. Sci. USA, 86:6230-6234 (1989). Oligonucleotide probes (allele-specific) hybridizing specifically to a TLK1, WARS2, ARTS2, MSR, AKAP9, DNAJD1, GOLPH4, RABEP1, TAP2, NARG2, DDX58, CD39, FKBP1a, SRI, XRRA1, IRF5 or AMFR gene allele having a particular gene variant at a particular locus but not to other alleles can be designed by methods known in the art. The probes can have a length of, e.g., from 10 to about 50 nucleotide bases. The target TLK1, WARS2, ARTS2, MSR, AKAP9, DNAJD1, GOLPH4, RABEP1, TAP2, NARG2, DDX58, CD39, FKBP1a, SRI, XRRA1, IRF5 or AMFR DNA and the oligonucleotide probe can be contacted with each other under conditions sufficiently stringent such that the nucleotide variant can be distinguished from the wild-type TLK1, WARS2, ARTS2, MSR, AKAP9, DNAJD1, GOLPH4, RABEP1, TAP2, NARG2, DDX58, CD39, FKBP1a, SRI, XRRA1, IRF5 or AMFR gene based on the presence or absence of hybridization. The probe can be labeled to provide detection signals. Alternatively, the allele-specific oligonucleotide probe can be used as a PCR amplification primer in an “allele-specific PCR” and the presence or absence of a PCR product of the expected length would indicate the presence or absence of a particular nucleotide variant.

[0470] Other useful hybridization-based techniques allow two single-stranded nucleic acids annealed together even in the presence of mismatch due to nucleotide substitution, insertion or deletion. The mismatch can then be detected using various techniques. For example, the annealed duplexes can be subject to electrophoresis. The mismatched duplexes can be detected based on their electrophoretic mobility that is different from the perfectly matched duplexes. See Cariello, Human Genetics, 42:726 (1988). Alternatively, in a RNase protection assay, a RNA probe can be prepared spanning the nucleotide variant site to be detected and having a detection marker. See Giunta et al., Diagn. Mol. Path., 5:265-270 (1996); Finkelstein et al., Genomics, 7:167-172 (1990); Kinszler et al., Science 251:1366-1370 (1991). The RNA probe can be hybridized to the target DNA or mRNA forming a heteroduplex that is then subject to the ribonuclease RNase A digestion. RNase A digests the RNA probe in the heteroduplex only at the site of mismatch. The digestion can be determined on a denaturing electrophoresis gel based on size variations. In addition, mismatches can also be detected by chemical cleavage methods known in the art. See e.g., Roberts et al., Nucleic Acids Res., 25:3377-3378 (1997).

[0471] In the mutS assay, a probe can be prepared matching the TLK1, WARS2, ARTS2, MSR, AKAP9, DNAJD1, GOLPH4, RABEP1, TAP2, NARG2, DDX58, CD39, FKBP1a, SRI, XRRA1, IRF5 or AMFR gene sequence surrounding the locus at which the presence or absence of a mutation is to be detected, except that a predetermined nucleotide is used at the variant locus. Upon annealing the probe to the target DNA to form a duplex, the E. coli mutS protein is contacted with the duplex. Since the mutS protein binds only to heteroduplex sequences containing a nucleotide mismatch, the binding of the mutS protein will be indicative of the presence of a mutation. See Modrich et al., Ann. Rev. Genet., 25:229-253 (1991).

[0472] A great variety of improvements and variations have been developed in the art on the basis of the above-described basic techniques, and can all be useful in detecting mutations or nucleotide variants in the present invention. For example, the “sunrise probes” or “molecular beacons” utilize the fluorescence resonance energy transfer (FRET) property and give rise to high sensitivity. See Wolf et al., Proc. Nat. Acad. Sci. USA, 85:8790-8794 (1988). Typically, a probe spanning the nucleotide locus to be detected are designed into a hairpin-shaped structure and labeled with a quenching fluorophore at one end and a reporter fluorophore at the other end. In its natural state, the fluorescence from the reporter fluorophore is quenched by the quenching fluorophore due to the proximity of one fluorophore to the other. Upon hybridization of the probe to the target DNA, the 5′ end is separated apart from the 3′-end and thus fluorescence signal is regenerated. See Nazarenko et al., Nucleic Acids Res., 25:2516-2521 (1997); Rychlik et al., Nucleic Acids Res., 17:8543-8551 (1989); Sharkey et al., Bio/Technology 12:506-509 (1994); Tyagi et al., Nat. Biotechnol., 14:303-308 (1996); Tyagi et al., Nat. Biotechnol., 16:49-53 (1998). The homo-tag assisted non-dimer system (HANDS) can be used in combination with the molecular beacon methods to suppress primer-dimer accumulation. See Brownie et al., Nucleic Acids Res., 25:3235-3241 (1997).

[0473] Dye-labeled oligonucleotide ligation assay is a FRET-based method, which combines the OLA assay and PCR. See Chen et al., Genome Res. 8:549-556 (1998). TaqMan is another FRET-based method for detecting nucleotide variants. A TaqMan probe can be oligonucleotides designed to have the nucleotide sequence of the TLK1, WARS2, ARTS2, MSR, AKAP9, DNAJD1, GOLPH4, RABEP1, TAP2, NARG2, DDX58, CD39, FKBP1a, SRI, XRRA1, IRF5 or AMFR gene spanning the variant locus of interest and to differentially hybridize with different TLK1, WARS2, ARTS2, MSR, AKAP9, DNAJD1, GOLPH4, RABEP1, TAP2, NARG2, DDX58, CD39, FKBP1a, SRI, XRRA1, IRF5 or AMFR alleles. The two ends of the probe are labeled with a quenching fluorophore and a reporter fluorophore, respectively. The TaqMan probe is incorporated into a PCR reaction for the amplification of a target TLK1, WARS2, ARTS2, MSR, AKAP9, DNAJD1, GOLPH4, RABEP1, TAP2, NARG2, DDX58, CD39, FKBP1a, SRI, XRRA1, IRF5 or AMFR gene region containing the locus of interest using Taq polymerase. As Taq polymerase exhibits 5′-3′ exonuclease activity but has no 3′-5′ exonuclease activity, if the TaqMan probe is annealed to the target TLK1, WARS2, ARTS2, MSR, AKAP9, DNAJD1, GOLPH4, RABEP1, TAP2, NARG2, DDX58, CD39, FKBP1a, SRI, XRRA1, IRF5 or AMFR DNA template, the 5′-end of the TaqMan probe will be degraded by Taq polymerase during the PCR reaction thus separating the reporting fluorophore from the quenching fluorophore and releasing fluorescence signals. See Holland et al., Proc. Natl. Acad. Sci. USA, 88:7276-7280 (1991); Kalinina et al., Nucleic Acids Res., 25:1999-2004 (1997); Whitcombe et al., Clin. Chem., 44:918-923 (1998).

[0474] In addition, the detection in the present invention can also employ a chemiluminescence-based technique. For example, an oligonucleotide probe can be designed to hybridize to either the wild-type or a variant TLK1, WARS2, ARTS2, MSR, AKAP9, DNAJD1, GOLPH4, RABEP1, TAP2, NARG2, DDX58, CD39, FKBP1a, SRI, XRRA1, IRF5 or AMFR gene locus but not both. The probe is labeled with a highly chemiluminescent acridinium ester. Hydrolysis of the acridinium ester destroys chemiluminescence. The hybridization of the probe to the target DNA prevents the hydrolysis of the acridinium ester. Therefore, the presence or absence of a particular mutation in the target DNA is determined by measuring chemiluminescence changes. See Nelson et al., Nucleic Acids Res., 24:4998-5003 (1996).

[0475] The detection of genetic variation in the TLK1, WARS2, ARTS2, MSR, AKAP9, DNAJD1, GOLPH4, RABEP1, TAP2, NARG2, DDX58, CD39, FKBP1a, SRI, XRRA1, IRF5 or AMFR gene in accordance with the present invention can also be based on the “base excision sequence scanning” (BESS) technique. The BESS method is a PCR-based mutation scanning method. BESS T-Scan and BESS G-Tracker are generated which are analogous to T and G ladders of dideoxy sequencing. Mutations are detected by comparing the sequence of normal and mutant DNA. See, e.g., Hawkins et al., Electrophoresis, 20:1171-1176 (1999).

[0476] Another useful technique that is gaining increased popularity is mass spectrometry. See Graber et al., Curr. Opin. Biotechnol., 9:14-18 (1998). For example, in the primer oligo base extension (PROBE™) method, a target nucleic acid is immobilized to a solid-phase support. A primer is annealed to the target immediately 5′ upstream from the locus to be analyzed. Primer extension is carried out in the presence of a selected mixture of deoxyribonucelotides and dideoxyribonucleotides. The resulting mixture of newly extended primers is then analyzed by MALDI-TOF. See e.g., Monforte et al., Nat. Med., 3:360-362 (1997).

[0477] In addition, the microchip or microarray technologies are also applicable to the detection method of the present invention. Essentially, in microchips, a large number of different oligonucleotide probes are immobilized in an array on a substrate or carrier, e.g., a silicon chip or glass slide. Target nucleic acid sequences to be analyzed can be contacted with the immobilized oligonucleotide probes on the microchip. See Lipshutz et al., Biotechniques, 19:442-447 (1995); Chee et al., Science, 274:610-614 (1996); Kozal et al., Nat. Med. 2:753-759 (1996); Hacia et al., Nat. Genet., 14:441-447 (1996); Saiki et al., Proc. Natl. Acad. Sci. USA, 86:6230-6234 (1989); Gingeras et al., Genome Res., 8:435-448 (1998). Alternatively, the multiple target nucleic acid sequences to be studied are fixed onto a substrate and an array of probes is contacted with the immobilized target sequences. See Drmanac et al., Nat. Biotechnol., 16:54-58 (1998). Numerous microchip technologies have been developed incorporating one or more of the above described techniques for detecting mutations. The microchip technologies combined with computerized analysis tools allow fast screening in a large scale. The adaptation of the microchip technologies to the present invention will be apparent to a person of skill in the art apprised of the present disclosure. See, e.g., U.S. Pat. No. 5,925,525 to Fodor et al; Wilgenbus et al., J. Mol. Med., 77:761-786 (1999); Graber et al., Curr. Opin. Biotechnol., 9:14-18 (1998); Hacia et al., Nat. Genet., 14:441-447 (1996); Shoemaker et al., Nat. Genet., 14:450-456 (1996); DeRisi et al., Nat. Genet., 14:457-460 (1996); Chee et al., Nat. Genet., 14:610-614 (1996); Lockhart et al., Nat. Genet., 14:675-680 (1996); Drobyshev et al., Gene, 188:45-52 (1997).

[0478] As is apparent from the above survey of the suitable detection techniques, it may or may not be necessary to amplify the target DNA, i.e., the TLK1, WARS2, ARTS2, MSR, AKAP9, DNAJD1, GOLPH4, RABEP1, TAP2, NARG2, DDX58, CD39, FKBP1a, SRI, XRRA1, IRF5 or AMFR gene or cDNA or mRNA to increase the number of target DNA molecule, depending on the detection techniques used. For example, most PCR-based techniques combine the amplification of a portion of the target and the detection of the mutations. PCR amplification is well known in the art and is disclosed in U.S. Pat. Nos. 4,683,195 and 4,800,159, both which are incorporated herein by reference. For non-PCR-based detection techniques, if necessary, the amplification can be achieved by, e.g., in vivo plasmid multiplication, or by purifying the target DNA from a large amount of tissue or cell samples. See generally, Sambrook et al., Molecular Cloning: A Laboratory Manual, 2^{nd} ed., Cold Spring Harbor Laboratory, Cold Spring Harbor, N.Y., 1989. However, even with scarce samples, many sensitive techniques have been developed in which small genetic variations such as single-nucleotide substitutions can be detected without having to amplify the target DNA in the sample. For example, techniques have been developed that amplify the signal as opposed to the target DNA by, e.g., employing branched DNA or dendrimers that can hybridize to the target DNA. The branched or dendrimer DNAs provide multiple hybridization sites for hybridization probes to attach thereto thus amplifying the detection signals. See Detmer et al., J. Clin. Microbiol., 34:901-907 (1996); Collins et al., Nucleic Acids Res., 25:2979-2984 (1997); Horn et al., Nucleic Acids Res., 25:4835-4841 (1997); Horn et al., Nucleic Acids Res., 25:4842-4849 (1997); Nilsen et al., J. Theor. Biol., 187:273-284 (1997).

[0479] In yet another technique for detecting single nucleotide variations, the Invader® assay utilizes a novel linear signal amplification technology that improves upon the long turnaround times required of the typical PCR DNA sequenced-based analysis. See Cooksey et al., Antimicrobial Agents and Chemotherapy 44:1296-1301 (2000). This assay is based on cleavage of a unique secondary structure formed between two overlapping oligonucleotides that hybridize to the target sequence of interest to form a “flap.” Each “flap” then generates thousands of signals per hour. Thus, the results of this technique can be easily read, and the methods do not require exponential amplification of the DNA target. The Invader® system utilizes two short DNA probes, which are hybridized to a DNA target. The structure formed by the hybridization event is recognized by a special cleavase enzyme that cuts one of the probes to release a short DNA “flap.” Each released “flap” then binds to a fluorescently-labeled probe to form another cleavage structure. When the cleavase enzyme cuts the labeled probe, the probe emits a detectable fluorescence signal. See e.g. Lyamichev et al., Nat. Biotechnol., 17:292-296 (1999).

[0480] The rolling circle method is another method that avoids exponential amplification. Lizardi et al., Nature Genetics, 19:225-232 (1998) (which is incorporated herein by reference). For example, Sniper™, a commercial embodiment of this method, is a sensitive, high-throughput SNP scoring system designed for the accurate fluorescent detection of specific variants. For each nucleotide variant, two linear, allele-specific probes are designed. The two allele-specific probes are identical with the exception of the 3′-base, which is varied to complement the variant site. In the first stage of the assay, target DNA is denatured and then hybridized with a pair of single, allele-specific, open-circle oligonucleotide probes. When the 3′-base exactly complements the target DNA, ligation of the probe will preferentially occur. Subsequent detection of the circularized oligonucleotide probes is by rolling circle amplification, whereupon the amplified probe products are detected by fluorescence. See Clark and Pickering, Life Science News 6, 2000, Amersham Pharmacia Biotech (2000).

[0481] A number of other techniques that avoid amplification all together include, e.g., surface-enhanced resonance Raman scattering (SERRS), fluorescence correlation spectroscopy, and single-molecule electrophoresis. In SERRS, a chromophore-nucleic acid conjugate is absorbed onto colloidal silver and is irradiated with laser light at a resonant frequency of the chromophore. See Graham et al., Anal. Chem., 69:4703-4707 (1997). The fluorescence correlation spectroscopy is based on the spatio-temporal correlations among fluctuating light signals and trapping single molecules in an electric field. See Eigen et al., Proc. Natl. Acad. Sci. USA, 91:5740-5747 (1994). In single-molecule electrophoresis, the electrophoretic velocity of a fluorescently tagged nucleic acid is determined by measuring the time required for the molecule to travel a predetermined distance between two laser beams. See Castro et al., Anal. Chem., 67:3181-3186 (1995).

[0482] In addition, the allele-specific oligonucleotides (ASO) can also be used in in situ hybridization using tissues or cells as samples. The oligonucleotide probes which can hybridize differentially with the wild-type gene sequence or the gene sequence harboring a mutation may be labeled with radioactive isotopes, fluorescence, or other detectable markers. In situ hybridization techniques are well known in the art and their adaptation to the present invention for detecting the presence or absence of a nucleotide variant in the TLK1, WARS2, ARTS2, MSR, AKAP9, DNAJD1, GOLPH4, RABEP1, TAP2, NARG2, DDX58, CD39, FKBP1a, SRI, XRRA1, IRF5 or AMFR gene of a particular individual should be apparent to a skilled artisan apprised of this disclosure.

[0483] Protein-based detection techniques may also prove to be useful, especially when the nucleotide variant causes amino acid substitutions or deletions or insertions or frameshift that affect the protein primary, secondary or tertiary structure. To detect the amino acid variations, protein sequencing techniques may be used. For example, an TLK1, WARS2, ARTS2, MSR, AKAP9, DNAJD1, GOLPH4, RABEP1, TAP2, NARG2, DDX58, CD39, FKBP1a, SRI, XRRA1, IRF5 or AMFR protein or fragment thereof can be synthesized by recombinant expression using an TLK1, WARS2, ARTS2, MSR, AKAP9, DNAJD1, GOLPH4, RABEP1, TAP2, NARG2, DDX58, CD39, FKBP1a, SRI, XRRA1, IRF5 or AMFR DNA fragment isolated from an individual to be tested. Preferably, an TLK1, WARS2, ARTS2, MSR, AKAP9, DNAJD1, GOLPH4, RABEP1, TAP2, NARG2, DDX58, CD39, FKBP1a, SRI, XRRA1, IRF5 or AMFR cDNA fragment of no more than 100 to 150 base pairs encompassing the polymorphic locus to be determined is used. The amino acid sequence of the peptide can then be determined by conventional protein sequencing methods. Alternatively, the recently developed HPLC-microscopy tandem mass spectrometry technique can be used for determining the amino acid sequence variations. In this technique, proteolytic digestion is performed on a protein, and the resulting peptide mixture is separated by reversed-phase chromatographic separation. Tandem mass spectrometry is then performed and the data collected therefrom is analyzed. See Gatlin et al., Anal. Chem., 72:757-763 (2000).

[0484] Other useful protein-based detection techniques include immunoaffinity assays based on antibodies selectively immunoreactive with mutant TLK1, WARS2, ARTS2, MSR, AKAP9, DNAJD1, GOLPH4, RABEP1, TAP2, NARG2, DDX58, CD39, FKBP1a, SRI, XRRA1, IRF5 or AMFR proteins according to the present invention. The method for producing such antibodies is described above in detail. Antibodies can be used to immunoprecipitate specific proteins from solution samples or to immunoblot proteins separated by, e.g., polyacrylamide gels. Immunocytochemical methods can also be used in detecting specific protein polymorphisms in tissues or cells. Other well-known antibody-based techniques can also be used including, e.g., enzyme-linked immunosorbent assay (ELISA), radioimmunoassay (RIA), immunoradiometric assays (IRMA) and immunoenzymatic assays (IEMA), including sandwich assays using monoclonal or polyclonal antibodies. See e.g., U.S. Pat. Nos. 4,376,110 and 4,486,530, both of which are incorporated herein by reference.

[0485] Accordingly, the presence or absence of an TLK1, WARS2, ARTS2, MSR, AKAP9, DNAJD1, GOLPH4, RABEP1, TAP2, NARG2, DDX58, CD39, FKBP1a, SRI, XRRA1, IRF5 or AMFR nucleotide variant or amino acid variant in an individual can be determined using any of the detection methods described above.

[0486] Typically, once the presence or absence of an TLK1, WARS2, ARTS2, MSR, AKAP9, DNAJD1, GOLPH4, RABEP1, TAP2, NARG2, DDX58, CD39, FKBP1a, SRI, XRRA1, IRF5 or AMFR nucleotide variant or an amino acid variant resulting from a nucleotide variant of the present invention is determined, physicians or genetic counselors or patients or other researchers may be informed of the result. Specifically the result can be cast in a transmittable form that can be communicated or transmitted to other researchers or physicians or genetic counselors or patients. Such a form can vary and can be tangible or intangible. The result with regard to the presence or absence of a TLK1, WARS2, ARTS2, MSR, AKAP9, DNAJD1, GOLPH4, RABEP1, TAP2, NARG2, DDX58, CD39, FKBP1a, SRI, XRRA1, IRF5 or AMFR nucleotide variant of the present invention in the individual tested can be embodied in descriptive statements, diagrams, photographs, charts, images or any other visual forms. For example, images of gel electrophoresis of PCR products can be used in explaining the results. Diagrams showing where a variant occurs in an individual's TLK1, WARS2, ARTS2, MSR, AKAP9, DNAJD1, GOLPH4, RABEP1, TAP2, NARG2, DDX58, CD39, FKBP1a, SRI, XRRA1, IRF5 or AMFR gene are also useful in indicating the testing results. The statements and visual forms can be recorded on a tangible media such as papers, computer readable media such as floppy disks, compact disks, etc., or on an intangible media, e.g., an electronic media in the form of email or website on internet or intranet. In addition, the result with regard to the presence or absence of a nucleotide variant or amino acid variant of the present invention in the individual tested can also be recorded in a sound form and transmitted through any suitable media, e.g., analog or digital cable lines, fiber optic cables, etc., via telephone, facsimile, wireless mobile phone, internet phone and the like.

[0487] Thus, the information and data on a test result can be produced anywhere in the world and transmitted to a different location. For example, when a genotyping assay is conducted offshore, the information and data on a test result may be generated and cast in a transmittable form as described above. The test result in a transmittable form thus can be imported into the U.S. Accordingly, the present invention also encompasses a method for producing a transmittable form of information on the TLK1, WARS2, ARTS2, MSR, AKAP9, DNAJD1, GOLPH4, RABEP1, TAP2, NARG2, DDX58, CD39, FKBP1a, SRI, XRRA1, IRF5 or AMFR genotype of an individual. The method comprises the steps of (1) determining the presence or absence of a nucleotide variant according to the present invention in the TLK1, WARS2, ARTS2, MSR, AKAP9, DNAJD1, GOLPH4, RABEP1, TAP2, NARG2, DDX58, CD39, FKBP1a, SRI, XRRA1, IRF5 or AMFR gene of the individual; and (2) embodying the result of the determining step in a transmittable form. The transmittable form is the product of the production method.

[0488] The present invention also provides a kit for genotyping TLK1, WARS2, ARTS2, MSR, AKAP9, DNAJD1, GOLPH4, RABEP1, TAP2, NARG2, DDX58, CD39, FKBP1a, SRI, XRRA1, IRF5 or AMFR gene, i.e., determining the presence or absence of one or more of the nucleotide or amino acid variants of present invention in a TLK1, WARS2, ARTS2, MSR, AKAP9, DNAJD1, GOLPH4, RABEP1, TAP2, NARG2, DDX58, CD39, FKBP1a, SRI, XRRA1, IRF5 or AMFR gene in a sample obtained from a patient. The kit may include a carrier for the various components of the kit. The carrier can be a container or support, in the form of, e.g., bag, box, tube, rack, and is optionally compartmentalized. The carrier may define an enclosed confinement for safety purposes during shipment and storage. The kit also includes various components useful in detecting nucleotide or amino acid variants discovered in accordance with the present invention using the above-discussed detection techniques.

[0489] In one embodiment, the detection kit includes one or more oligonucleotides useful in detecting one or more of the nucleotide variants in TLK1, WARS2, ARTS2, MSR, AKAP9, DNAJD1, GOLPH4, RABEP1, TAP2, NARG2, DDX58, CD39, FKBP1a, SRI, XRRA1, IRF5 or AMFR gene. Preferably, the oligonucleotides are allele-specific, i.e., are designed such that they hybridize only to a mutant TLK1, WARS2, ARTS2, MSR, AKAP9, DNAJD1, GOLPH4, RABEP1, TAP2, NARG2, DDX58, CD39, FKBP1a, SRI, XRRA1, IRF5 or AMFR gene containing a particular nucleotide variant discovered in accordance with the present invention, under stringent conditions. Thus, the oligonucleotides can be used in mutation-detecting techniques such as allele-specific oligonucleotides (ASO), allele-specific PCR, TaqMan, chemiluminescence-based techniques, molecular beacons, and improvements or derivatives thereof, e.g., microchip technologies. The oligonucleotides in this embodiment preferably have a nucleotide sequence that matches a nucleotide sequence of a variant TLK1, WARS2, ARTS2, MSR, AKAP9, DNAJD1, GOLPH4, RABEP1, TAP2, NARG2, DDX58, CD39, FKBP1a, SRI, XRRA1, IRF5 or AMFR gene allele containing a nucleotide variant to be detected. The length of the oligonucleotides in accordance with this embodiment of the invention can vary depending on its nucleotide sequence and the hybridization conditions employed in the detection procedure. Preferably, the oligonucleotides contain from about 10 nucleotides to about 100 nucleotides, more preferably from about 15 to about 75 nucleotides, e.g., contiguous span of 18, 19, 20, 21, 22, 23, 24 or 25 to 21, 22, 23, 24, 26, 27, 28, 29 or 30 nucleotide residues of a TLK1, WARS2, ARTS2, MSR, AKAP9, DNAJD1, GOLPH4, RABEP1, TAP2, NARG2, DDX58, CD39, FKBP1a, SRI, XRRA1, IRF5 or AMFR nucleic acid one or more of the residues being a nucleotide variant of the present invention, i.e., selected from Table 1. Under most conditions, a length of 18 to 30 may be optimum. In any event, the oligonucleotides should be designed such that it can be used in distinguishing one nucleotide variant from another at a particular locus under predetermined stringent hybridization conditions. Preferably, a nucleotide variant is located at the center or within one (1) nucleotide of the center of the oligonucleotides, or at the 3′ or 5′ end of the oligonucleotides. The hybridization of an oligonucleotide with a nucleic acid and the optimization of the length and hybridization conditions should be apparent to a person of skill in the art. See generally, Sambrook et al., Molecular Cloning: A Laboratory Manual, 2^{nd} ed., Cold Spring Harbor Laboratory, Cold Spring Harbor, N.Y., 1989. Notably, the oligonucleotides in accordance with this embodiment are also useful in mismatch-based detection techniques described above, such as electrophoretic mobility shift assay, RNase protection assay, mutS assay, etc.

[0490] In another embodiment of this invention, the kit includes one or more oligonucleotides suitable for use in detecting techniques such as ARMS, oligonucleotide ligation assay (OLA), and the like. The oligonucleotides in this embodiment include a TLK1, WARS2, ARTS2, MSR, AKAP9, DNAJD1, GOLPH4, RABEP1, TAP2, NARG2, DDX58, CD39, FKBP1a, SRI, XRRA1, IRF5 or AMFR gene sequence of about 10 to about 100 nucleotides, preferably from about 15 to about 75 nucleotides, e.g., contiguous span of 18, 19, 20, 21, 22, 23, 24 or 25 to 21, 22, 23, 24, 26, 27, 28, 29 or 30 nucleotide residues immediately 5′ upstream from the nucleotide variant to be analyzed. The 3′ end nucleotide in such oligonucleotides is a nucleotide variant in accordance with this invention.

[0491] The oligonucleotides in the detection kit can be labeled with any suitable detection marker including but not limited to, radioactive isotopes, fluorephores, biotin, enzymes (e.g., alkaline phosphatase), enzyme substrates, ligands and antibodies, etc. See Jablonski et al., Nucleic Acids Res., 14:6115-6128 (1986); Nguyen et al., Biotechniques, 13:116-123 (1992); Rigby et al., J. Mol. Biol., 113:237-251 (1977). Alternatively, the oligonucleotides included in the kit are not labeled, and instead, one or more markers are provided in the kit so that users may label the oligonucleotides at the time of use.

[0492] In another embodiment of the invention, the detection kit contains one or more antibodies selectively immunoreactive with certain TLK1, WARS2, ARTS2, MSR, AKAP9, DNAJD1, GOLPH4, RABEP1, TAP2, NARG2, DDX58, CD39, FKBP1a, SRI, XRRA1, IRF5 or AMFR proteins or polypeptides containing specific amino acid variants discovered in the present invention. Methods for producing and using such antibodies have been described above in detail.

[0493] Various other components useful in the detection techniques may also be included in the detection kit of this invention. Examples of such components include, but are not limited to, Taq polymerase, deoxyribonucleotides, dideoxyribonucleotides other primers suitable for the amplification of a target DNA sequence, RNase A, mutS protein, and the like. In addition, the detection kit preferably includes instructions on using the kit for detecting nucleotide variants in TLK1, WARS2, ARTS2, MSR, AKAP9, DNAJD1, GOLPH4, RABEP1, TAP2, NARG2, DDX58, CD39, FKBP1a, SRI, XRRA1, IRF5 or AMFR gene sequences.

### 7. Use of Genotyping in Diagnostic Applications

[0494] All of the SNPs of the present invention can be used to predict whether or not specific genes exhibit altered levels of expression in individual patients. As such, they all have utility in a variety of applications beyond those specifically described below. In particular, the SNPs can be used to catagorize patient populations into population subgroups based upon the relative level of gene expression associated with a particular SNP. For example, patents can be classified as normal-expressors, when they exhibit average or intermediate levels of gene expression; over-expressors, when they exhibit increased levels of gene expression; or under-expressors, when they exhibit reduced levels of gene expression. These categories or patient population sub-groupings can be useful when evaluating the effect that altered gene expression has on particular physiological or pharmacokinetic parameters, or selecting patients for clinical trials for therapeutic treatments.

[0495] In those situations where a protein being expressed directly plays a critical biological role in the human body, assessment of an individual's genotype at a SNP associated with altered levels of expression of the gene encoding this protein may prove more efficient, economical, and more reliably predictive, than assays designed to detect the gene product (e.g., mRNA or protein) itself. One can readily envision large-scale screens of SNPs associated with altered levels of gene expression being conducted for multiple genes on a single microchip designed to simultaneously assess the expression of a large number of genes whose products are known to be involved in increased risk of a particular undesirable phenotype.

[0496] For example, where a protein being expressed plays a role in some aspect of drug metabolism, including, for example, detoxification, secretion or excretion, assessment of an individual's genotype at a SNP associated with altered levels of expression of the gene encoding this protein may prove more efficient, economical, and more reliably predictive, than assays designed to detect the effects of the gene product (e.g., enzyme), such as altered pharmacokinetic profiles, rapid excretion, reduced efficacy of the drug, etc.

[0497] Additionally, when the relative level of expression of a particular set of genes can be predicted by the presence or absence of a particular SNP, diagnostic assays designed to assess the expression levels of the specific individual genes becomes superflouous, since detection of a single SNP would prove more economical or informative than the quantitiative analysis of expression of the individual genes at the mRNA or protein level. Such a situation would be expected when the single SNP being genotyped is associated with the level of expression of a transcription factor, whose over-expression would result in increased transcription of a multiplicity of genes.

[0498] When selecting patients to be included in clinical trails of candidate drug compounds, the SNPs of the instant invention can be used to decide which patients to enroll in the trials, and which patients to exclude. The SNPs could also be used to determine which patients should be included in particular dosage regimes within a clinical trial. For example, if the SNP is associated with expression levels of a gene involved in the metabolism of the candidate drug, patients that are categorized as over-expressors could be intentionally placed in higher dosage regimes, than those identified as under-expressors.

[0499] Similarly, the SNPs of the instant invention can provide critically useful information, which can be used to assist health practitioners in making decisions about the method and course of treatment to be given to specific patients. The information provided by these SNPs can, for example, direct the practitioner to choose one particular type of drug over another. In other words, the information provided by these SNPs can be used to direct qualititative decisions for treatment. Additionally, the information provided by these SNPs can be used to direct quantitative decisions for treatment of patients, such as the dosage to be given, the frequency with which it is given, and even the route by which the dosage is to be administered.

[0500] The SNPs of the instant invention can also be used to predict physiologic or pharmacokinetic consequences of treatment with a specific drug at a specific dosage.

[0501] Specific diagnostic and prognostic applications for the SNPs of the present invention will now be discussed.

TLK1

[0502] As indicated in Tables 1, 2 or 3 and Tables 36 and 37, the expression level of the TLK1 gene in human cells is an inheritable “quantitative trait” with genetic determinants. Furthermore, the SNPs and/or haplotypes in accordance with the present invention are associated with the “quantitative trait”, i.e., the TLK1 mRNA level in human cells. Specifically, the SNPs EX7@+63A, EX7@+190C, EX11@51G and EX25@855A of TLK1 are associated with a “low expression phenotype” while the EX7@+63G, EX7@+190T, EX11@51A and EX25@855G of TLK1 are associated with a “high expression phenotype.” Thus, the SNPs and/or haplotypes are particularly useful in predicting the level of TLK1 gene expression in an individual.

[0503] Thus, in one aspect, the present invention encompasses a method for predicting or detecting cancer susceptibility in an individual, which comprises the step of genotyping the individual to determine the individual's genotype at one or more of the TLK1 loci identified in the present invention, namely EX7@+63, EX7@+190, EX11@51 and EX25@855; or, at another locus at which the genotype is in linkage disequilibrium with one of the SNPs of the present invention. Thus, if one or more the EX7@+63A, EX7@+190C, EX11@51G and EX25@855A are detected, or a SNP that is in linkage disequilibrium with any one of such SNPs is detected in the individual, then it can be reasonably predicted that there is an increased likelihood that the individual will have an increased level of chromosome missegregation and aneuploidy and, thus, is at an increased risk of developing cancer. In particular, if an individual is homozygous with the TLK1 genotype EX7@+63A/A, EX7@+190C/C, EX11@51G/G and/or EX25@855A/A, then it can be reasonably predicted that the individual has an elevated susceptibility to chromosome missegregation and aneuploidy. In other words, such an individual has an increased likelihood or is at an increased risk of developing cancer. If an individual is heterozygous, then his or her risk of developing cancer is at an intermediate level. On the other hand, if the individual is homozygous with the TLK1 genotype EX7@+63G/G, EX7@+190T/T, EX11@51A/A and/or EX25@855G/G, then it can be reasonably predicted that the individual has a reduced susceptibility to cancer. Alternatively, if the individual is homozygous with a genotype at a TLK1 locus that is in the same haplotype with the SNPs EX7@+63A, EX7@+190C, EX11@51G and/or EX25@855A (in linkage disequilibrium), then it can reasonably be predicted that the individual has an increased susceptibility to cancer.

[0504] In another aspect of the present invention, a method is provided for predicting susceptibility to diseases associated with DNA damage including, but not limited to, heart disease and cancer. This method comprises genotyping the individual at one of more of the TLK1 loci identified in the present invention, namely EX7@+63, EX7@+190, EX11@51 and/or EX25@855, or another locus at which the genotype is in linkage disequilibrium with one of the SNPs of the present invention. Thus, if one or more of the SNPs EX7@+63G, EX7@+190T, EX11@51A or EX25@855G are detected, than it can be reasonably predicted that the individual has an increased susceptibility to cancer. Specifically, if the individual is homozygous with the TLK1 genotype EX7@+63G/G, EX7@+190T/T, EX11@51A/A or EX25@855G/G, it can be reasonably predicted that the individual has an elevated susceptibility to DNA damage such as that caused by ionizing radiation. If the individual is heterozygous, it can be predicted the individual will have an intermediate susceptibility to cancer. On the other hand, if the individual is homozygous with the TLK1 genotype EX7@+63G/G, EX7@+190T/T, EX11@51A/A and/or EX25@855G/G, then it can be reasonably predicted that the individual has a reduced susceptibility to cancer, especially those associated with DNA damage.

[0505] In yet another aspect, the present invention provides a method of predicting patient and tumor response to cancer treatment. Although some normal cells are affected by radiation, most normal cells appear to recover more fully from the effects of radiation than do cancer cells. In accordance with the present invention, the TLK1 gene of a patient in need of radiation treatment is sequenced to determine the genotype at one or more of the SNPs or haplotypes of the present invention, specifically mainly EX7@+63, EX7@+190, EX11@51 and EX25@855, or another locus at which the genotype is in linkage disequilibrium with any one of the SNPs of the present invention. Expression levels of TLK1 can be utilized to predict the effectiveness of treatment in a patient, and the ability of the patient to recover from the radiation therapy treatment itself. If one or more of the SNPs EX7@+63G, EX7@+190T, EX11@51A and EX25@855G are detected in the patient's genome, or a SNP that is in linkage disequilibrium with any one of such SNPs is detected in an individual, then it can be reasonably predicted that the patient is likely to recover more rapidly from the DNA damaging radiation therapy treatment. In short, the individual will likely have a shorter recovery time from the treatment. On the other hand, where an individual has the TLK1 genotype EX7@+63A/A, EX7@+190C/C, EX11@51A/A and EX25@855G/G, then it can be reasonably predicted that the individual will a slower recovery from cancer treatments involving DNA damage, such as radiation therapy.

[0506] While the above discussion relates to the expected recovery of the patient from the DNA damaging radiation therapy, it is necessary to determine the TLK1 genotype of the cancerous growth in order to predict the likely efficacy of radiation treatment in killing the cancer, since increased TLK1 expression by a tumor would be expected to result in increased resistance of the tumor to the DNA damaging treatment. In the event that the cancerous growth has the TLK1 genotype EX7@+63G/G, EX7@+190T/T, EX11@51G/G and EX25@855A/A, it can be reasonably predicted that the cancer will have a decreased response to radiation therapy. If the cancerous growth is heterozygous, it can be predicted that the cancer will have an intermediate response to treatment. On the other hand, where the cancerous growth has the TLK1 genotype EX7@+63A/A, EX7@+190C/C, EX11@51A/A and EX25@855G/G, then it can be reasonably predicted that the cancerous growth will have an increased sensitivity to cancer treatment involving DNA damage, and treatment by ionizing radiation would be expected to be more effective at killing the cancer.

[0507] Another aspect of the present invention provides a method of predicting the risk of DNA-damaging therapy in creating new cancer, especially leukemia. This method comprises the step of genotyping the patient to determine the patient's genotype at one or more of the TLK1 loci specified in the present invention; specifically EX7@+63, EX7@+190, EX11@51 and EX25@855, or another locus at which the genotype is in linkage disequilibrium with one of the SNPs or haplotypes of the present invention. Thus, if one or more of the SNPs EX7@+63G, EX7@+190T, EX11@51A and EX25@855G are detected in a patient, it can be predicted that the patient will have an increased DNA-damaging therapy, and would be less likely to develop a new cancer, such as leukemia, as a result of the DNA-damaging therapy used to treat the initial cancer. Alternatively, if one or more of the SNPs EX7@+63A, EX7@+190C, EX11@51G and EX25@855A are present in the patient, it can be predicted that the individual will be more susceptible to developing a secondary cancer as a result of treatment using DNA-damaging therapy.

[0508] Particularly, if a patient is homozygous with the TLK1 genotype EX7@+63G/G, EX7@+190T/T, EX11@51A/A and EX25@855G/G, then the patient has a higher resistance to DNA-damaging therapy, such as treatment with ionizing radiation. Conversely, if the patient is homozygous with the TLK1 genotype EX7@+63A/A, EX7@+190C/C, EX11@51G/G and EX25@855A/A, then the patient has an increased susceptibility to secondary cancers caused by the primary cancer treatment with DNA-damaging therapy, such as treatment with ionizing radiation.

[0509] In another aspect of the present invention, a method is provided for predicting or detecting susceptibility to metabolic disorders such as diabetes, insulin resistance, Hermansky-Pudlak syndrome and ARC syndrome in an individual, comprising determining the genotype of an individual at one TLK1 loci identified in the present invention, namely EX7@+63, EX7@+190, EX11@51 and EX25@855; or, at another locus which is in linkage disequilibrium with one of the SNPs or haplotypes of the present invention. Thus, if one or more the TLK1 SNPs EX7@+63G, EX7@+190T, EX11@51A and EX25@855G are detected, or a SNP that is in linkage disequilibrium with any one of such SNPs is detected in the individual, then it can be reasonably predicted that the individual is at an increased risk of developing a metabolic disorder such as diabetes or insulin resistance. Particularly, if an individual is homozygous with the TLK1 genotype EX7@+63A/A, EX7@+190C/C, EX11@51G/G and EX25@855A/A, it can be reasonably predicted that the individual will have an increased susceptibility to metabolic disorders such as diabetes and insulin resistance. An individual that is heterozygous will have an intermediate risk of developing metabolic disorders. On the other hand, if an individual is homozygous with the TLK1 genotype EX7@+63G/G, EX7@+190T/T, EX11@51A/A and EX25@855G/G, it can be predicted that an individual will have a decreased susceptibility to metabolic disorders such as diabetes, insulin resistance, Hermansky-Pudlak syndrome and ARC syndrome.

[0510] The SNPs listed in Table 3, i.e. those at positions 171,620,667, 171,622,696, 171,622,741 and 171,840,599 of chromosome II, have also been shown to be associated with altered TLK1 mRNA levels. Chromosome II SNPs associated with lower TLK1 mRNA expression levels are 171,620,667G, 171,622,696G, 171,622,741C and 171,840,599G, whereas those associated with higher TLK1 mRNA expression are 171,620,667A, 171,622,696A, 171,622,741T and 171,840,599A. In addition to the SNPs described above, these chromosome II SNPs may be utilized in the applications, as described above.

WARS2

[0511] As indicated in Table 4 above and Table 38 and 39 below, the expression level of the WARS2 gene in human cells is an inheritable “quantitative trait” with genetic determinants. Furthermore, the WARS2 gene SNPs in accordance with the present invention are associated with the “quantitative trait”, i.e., the WARS2 mRNA level in human cells. Specifically, the WARS2 SNPs EX1@−963G, EX1@−103T, EX6@780G, EX6@842T and EX6@2152G are associated with a “low expression phenotype” while the EX1@−963A, EX1@−103C, EX6@780A, EX6@842G and EX6@2152A SNPs are associated with a “high expression phenotype.” Thus, the WARS2 SNPs are particularly useful in predicting the level of WARS2 gene expression in an individual.

[0512] Thus, in one aspect, the present invention encompasses a method for predicting or detecting susceptibility to neurodegenerative disease in an individual, which comprises the step of genotyping the individual to determine the individual's genotype at one or more of the WARS2 loci identified in the present invention, namely EX1@−963, EX1@−103, EX6@780, EX6@842 or EX6@2152; or, at another locus at which the genotype is in linkage disequilibrium with one of the SNPs of the present invention. Thus, if one or more the SNPs EX1@−963G, EX1@−103T, EX6@780G, EX6@842T or EX6@2152G are detected, or a SNP that is in linkage disequilibrium with any one of such SNPs is detected in the individual, then it can be reasonably predicted that the individual is at an increased risk of developing neurodegenerative disease, particularly Friedreich's ataxia, Huntington's disease, Alzheimer's disease, ALS and Parkinson's disease. In particular, if an individual is homozygous with the WARS2 genotype EX1@−963G/G, EX1@−103T/T, EX6@780G/G, EX6@842T/T or EX6@2152G/G, then it can be reasonably predicted that the individual has an elevated susceptibility to neurodegenerative disease, particularly Friedreich's ataxia, Huntington's disease, Alzheimer's disease, ALS and Parkinson's disease. If an individual is heterozygous, then his or her risk of developing neurodegenerative disease is at an intermediate level. One the other hand, if the individual is homozygous with the WARS2 genotype EX1@−963A/A, EX1@−103C/C, EX6@780A/A, EX6@842G/G or EX6@2152A/A, then it can be reasonably predicted that the individual has a reduced susceptibility to neurodegenerative disease, particularly Friedreich's ataxia, Huntington's disease, Alzheimer's disease, ALS and Parkinson's disease.

[0513] In another aspect, the present invention provides a method for predicting or detecting susceptibility to cardiovascular disease in an individual, which comprises the step of genotyping the individual to determine the individual's genotype at one or more of the WARS2 loci identified in the present invention, namely EX1@−963, EX1@−103, EX6@780, EX6@842 or EX6@2152, or another locus at which the genotype is in linkage disequilibrium with one of the SNPs of the present invention. Thus, if one or more the SNPs EX1@−963G, EX1@−103T, EX6@780G, EX6@842T or EX6@2152G are detected, or a SNP that is in linkage disequilibrium with any one of such SNPs is detected in the individual, then it can be reasonably predicted that the individual is at an increased risk of developing cardiovascular disease, such as dilated and hypertrophic cardiomyopathy, cardiac conduction defects, sudden death, ischemic and alcoholic cardiomyopathy, and myocarditis. In particular, if an individual is homozygous with the WARS2 genotype EX1@−963G/G, EX1@−103T/T, EX6@780G/G, EX6@842T/T or EX6@2152G/G, then it can be reasonably predicted that the individual has an elevated susceptibility to cardiovascular disease, such as dilated and hypertrophic cardiomyopathy, cardiac conduction defects, sudden death, ischemic and alcoholic cardiomyopathy, and myocarditis. If an individual is heterozygous, then his or her risk of developing cardiovascular disease is at an intermediate level. One the other hand, if the individual is homozygous with the WARS2 genotype EX1@−963A/A, EX1@−103C/C, EX6@780A/A, EX6@842G/G or EX6@2152A/A, then it can be reasonably predicted that the individual has a reduced susceptibility to cardiovascular disease, such as dilated and hypertrophic cardiomyopathy, cardiac conduction defects, sudden death, ischemic and alcoholic cardiomyopathy, and myocarditis.

[0514] In another aspect, the present invention provides a method for predicting or detecting cancer susceptibility in an individual, comprising the step of genotyping the individual to determine the individual's genotype at one or more of the WARS2 loci identified in the present invention, namely EX1@−963, EX1@−103, EX6@780, EX6@842 or EX6@2152, or another locus at which the genotype is in linkage disequilibrium with one of the SNPs of the present invention. Thus, if one or more the SNPs EX1@−963G, EX1@−103T, EX6@780G, EX6@842T or EX6@2152G are detected, or a SNP that is in linkage disequilibrium with any one of such SNPs is detected in the individual, then it can be reasonably predicted that the individual is at an increased risk of developing cancer. In particular, if an individual is homozygous with the WARS2 genotype EX1@−963G/G, EX1@−103T/T, EX6@780G/G, EX6@842T/T or EX6@2152G/G, then it can be reasonably predicted that the individual has an elevated susceptibility to cancer. If an individual is heterozygous, then his or her risk of developing cancer is at an intermediate level. One the other hand, if the individual is homozygous with the WARS2 genotype EX1@−963A/A, EX1@−103C/C, EX6@780A/A, EX6@842G/G or EX6@2152A/A, then it can be reasonably predicted that the individual has a reduced susceptibility to cancer.

[0515] In yet another aspect, the present invention provides a method for identifying high-risk patients who have a poor prognosis of cancer, or for the prognosis of cancer, or predicting/determining the invasiveness and metastatic potential of tumor in a patient, particularly a cancer patient. The individual to be tested can be a healthy person or an individual diagnosed with cancer. The method comprises the step of genotyping the individual to determine the individual's genotype at one or more of the WARS2 loci identified in the present invention, namely EX1@−963, EX1@−103, EX6@780, EX6@842 or EX6@2152; or, at another locus at which the genotype is in linkage disequilibrium with one of the SNPs or haplotypes of the present invention. Thus, if one or more the SNPs EX1@−963G, EX1-103T, EX6@780G, EX6@842T or EX6@2152G are detected, or a SNP that is in linkage disequilibrium with any one of such SNPs is detected in the individual, then it can be reasonably predicted that when cancer occurs within that individual, it has high metastatic potential, that the cancer has poor prognosis, and that the tumor cells are likely to be invasive. In other words, the individual has an increased likelihood, or is at an increased risk for cancer metastasis. Particularly, if an individual is homozygous with the WARS2 genotype EX1@−963G/G, EX1@−103T/T, EX6@780G/G, EX6@842T/T or EX6@2152G/G, then the individual has particular poor prognosis because it is likely that the tumor cells are highly invasive. In other words, the individual has a substantially increased likelihood, or is at a substantially increased risk for cancer metastasis. However, if an individual is heterozygous with the genotype EX1@−963G/A, EX1@−103T/C, EX6@780G/A, EX6@842T/G or EX6@2152G/A, then the individual has an intermediate prognosis and that the tumor cells are potentially invasive. Specifically, the individual has an intermediate level of risk for cancer metastasis. That is, the risk is greater than a person having a homozygous WARS2 genotype of EX1@−963A/A, EX1@−103C/C, EX6@780A/A, EX6@842G/G or EX6@2152A/A, but is lower than a person having a homozygous genotype of EX1@−963A/A, EX1@−103C/C, EX6@780A/A, EX6@842G/G or EX6@2152A/A.

[0516] Thus, if the individual is homozygous with a WARS2 genotype EX1@−963A/A, EX1@−103C/C, EX6@780A/A, EX6@842G/G or EX6@2152A/A, it can be reasonably predicted that any tumors in that individual have a low metastatic potential, that the cancer has good prognosis, and that the tumor cells are not likely to be invasive. That is, the individual does not have an increased likelihood, or increased risk, of cancer metastasis.

ARTS1

[0517] As indicated in Tables 5-11 and Tables 40-44, the expression level of the ARTS1 gene in human cells is an inheritable “quantitative trait” with genetic determinants. Furthermore, the SNPs and/or haplotypes in accordance with the present invention are associated with the “quantitative trait”, i.e., the ARTS1 mRNA level in human cells. Specifically, the SNPs EX1@−1125C, EX2@397C, EX20@1085G, EX6@126G, EX12@44A, EX15@74A, EX6@149C, EX8@−10G, EX9@39C, EX9@+18C, EX11@59G, EX12@−28G, EX12@−7C, EX15@88G, EX19@173A, EX19@328w, EX19@885C, EX20@2105T, EX20@719T and EX20@1038C are associated with a “low expression phenotype” while the EX1@−1125T, EX2@397G, EX20@1085A, EX6@126A, EX12@44G, EX15@74G, EX6@149T, EX8@−10A, EX9@39T, EX9@+18T, EX1@59A, EX12@−28T, EX12@−7A, EX15@88C, EX19@173C, EX19@328m, EX19@885T, EX20@2105C, EX20@719C and EX20@1038A are associated with a “high expression phenotype.” Thus, the SNPs and/or haplotypes are particularly useful in predicting the level of ARTS1 gene expression in an individual.

[0518] Thus, in one aspect, the present invention encompasses a method for predicting or detecting cancer susceptibility in an individual, which comprises the step of genotyping the individual to determine the individual's genotype at one or more of the ARTS1 loci identified in the present invention, namely EX1@−1125, EX2@397, EX20@1085, EX6@126, EX12@44, EX15@74, EX6@149, EX8@−10, EX9@39, EX9@+18, EX11@59, EX12@−28, EX12@−7, EX15@88, EX19@173, EX19@328, EX19@885, EX20@2105, EX20@719 or EX20@1038; or, at another locus at which the genotype is in linkage disequilibrium with one of the SNPs or haplotypes of the present invention. Thus, if one or more the ARTS1 SNPs EX1@−1125C, EX2@397C, EX20@1085G, EX6@126G, EX12@44A, EX15@74A, EX6@149C, EX8@−10G, EX9@39C, EX9@+18C, EX11@59G, EX12@−28G, EX12@−7C, EX15@88G, EX19@173A, EX19@328w, EX19@885C, EX20@2105T, EX20@719T or EX20@1038C are detected, or a SNP that is in linkage disequilibrium with any one of such SNPs is detected in the individual, then it can be reasonably predicted that the individual is at an increased risk of developing cancer, particularly skin cancer, lung cancer, ovarian cancer or thyoma. In particular, if an individual is homozygous with the ARTS1 genotype EX1@−1125C/C, EX2@397C/C, EX20@1085G/G, EX6@126G/G, EX12@44A/A, EX15@74A/A, EX6@149C/C, EX8@−10G/G, EX9@39C/C, EX9@+18C/C, EX11@59G/G, EX12@−28G/G, EX12@−7C/C, EX15@88G/G, EX19@173A/A, EX19@328w/w, EX19@885C/C, EX20@2105T/T, EX20@719T/T or EX20@1038C/C, then it can be reasonably predicted that the individual has an elevated susceptibility to cancer, particularly skin cancer (e.g., melanoma), lung cancer (e.g., NSCLCs), ovarian cancer or thyoma. Likewise, if the individual is homozygous with an ARTS1 genotype at a locus that is in the same haplotype with the SNPs EX6@126G, EX12@44A and EX15@74A (in linkage disequilibrium), or in the same haplotype (linkage disequilibrium) with the SNPs EX6@149C and EX8@−10G, or in the same haplotype (linkage disequilibrium) with the SNPs EX9@39C, EX9@+18C, EX11@59G, EX12@−28G, EX12@−7C and EX15@88G, or in the same haplotype (linkage disequilibrium) with the SNPs EX19@173A, EX19@328w, EX19@885C and EX20@2105T, or in the same haplotype (linkage disequilibrium) with the SNPs EX20@719T and EX20@1038C, then it can reasonably be predicted that the individual has an elevated susceptibility to cancer. In other words, such an individual has an increased likelihood or is at an increased risk of developing cancer. If an individual is heterozygous, then his or her risk of developing cancer is at an intermediate level. On the other hand, if the individual is homozygous with the ARTS1 genotype EX1@−1125T/T, EX2@397G/G, EX20@1085A/A, EX6@126A/A, EX12@44G/G, EX15@74G/G, EX6@149T/T, EX8@−10A/A, EX9@39T/T, EX9@+18T/T, EX11@59A/A, EX12@−28T/T, EX12@−7A/A, EX15@88C/C, EX19@173C/C, EX19@328 m/m, EX19@885T/T, EX20@2105C/C, EX20@719C/C or EX20@1038A/A, then it can be reasonably predicted that the individual has a reduced susceptibility to cancer. Similarly, if the individual is homozygous with an ARTS1 genotype at a locus that is in the same haplotype with the SNPs EX6@126A, EX12@44G and EX15@74G (in linkage disequilibrium), or in the same haplotype (linkage disequilibrium) with the SNPs EX6@149T and EX8@−10A, or in the same haplotype (linkage disequilibrium) with the SNPs EX9@39T, EX9@+18T, EX11@59A, EX12@−28T, EX12@−7A and EX15@88C, or in the same haplotype (linkage disequilibrium) with the SNPs EX19@173C, EX19@328m, EX19@885TC and EX20@2105C, or in the same haplotype (linkage disequilibrium) with the SNPs EX20@719C and EX20@1038A, then it can reasonably be predicted that the individual has a reduced susceptibility to cancer.

[0519] In another aspect, the present invention provides a method for identifying high-risk patients who have a poor prognosis of cancer, or for the prognosis of cancer, or predicting/determining the invasiveness and metastatic potential of a tumor in a patient, particularly cancer patient. The individual to be tested can be a healthy person or an individual diagnosed of cancer. The method comprises the step of genotyping the individual to determine the individual's genotype at one or more of the ARTS1 loci identified in the present invention, namely EX1@−1125, EX2@397, EX20@1085, EX6@126, EX12@44, EX15@74, EX6@149, EX8@−10, EX9@39, EX9@+18, EX11@59, EX12@−28, EX12@−7, EX15@88, EX19@173, EX19@328, EX19@885, EX20@2105, EX20@719 or EX20@1038; or, at another locus at which the genotype is in linkage disequilibrium with one of the SNPs or haplotypes of the present invention.

[0520] Thus, if one or more the ARTS1 SNPs EX1@−1125C, EX2@397C, EX20@1085G, EX6@126G, EX12@44A, EX15@74A, EX6@149C, EX8@−10G, EX9@39C, EX9@+18C, EX11@59G, EX12@−28G, EX12@−7C, EX15@88G, EX19@173A, EX19@328w, EX19@885C, EX20@2105T, EX20@719T or EX20@1038C are detected, or a SNP that is in linkage disequilibrium with any one of such SNPs is detected in the individual, then it can be reasonably predicted that cancers occurring within that individual have high metastatic potential, that the cancer has poor prognosis, and that the tumor cells are likely to be invasive. In other words, the individual has an increased likelihood, or is at an increased risk for cancer metastasis. Particularly, if an individual is homozygous with the ARTS1 genotype EX1@−1125C/C, EX2@397C/C, EX20@1085G/G, EX6@126G/G, EX12@44A/A, EX15@74A/A, EX6@149C/C, EX8@−10G/G, EX9@39C/C, EX9@+18C/C, EX11@59G/G, EX12@−28G/G, EX12@−7C/C, EX15@88G/G, EX19@173A/A, EX19@328w/w, EX19@885C/C, EX20@2105T/T, EX20@719T/T or EX20@1038C/C, then the individual has particularly poor prognosis and the tumor cells are likely highly invasive. In other words, the individual has a substantially increased likelihood, or is at a substantially increased risk from cancer metastasis. However, if an individual is heterozygous with the ARTS1 genotype EX1@−1125T/C, EX2@397C/G, EX20@1085G/A, EX6@126G/A, EX12@44G/A, EX15@74G/A, EX6@149T/C, EX8@−10G/A, EX9@39C/T, EX9@+18T/C, EX11@59G/A, EX12@−28G/T, EX12@−7C/A, EX15@88G/C, EX19@173C/A, EX19@328w/m, EX19@885C/T, EX20@2105T/C, EX20@719T/C or EX20@1038A/C, then the individual has poor prognosis and the tumor cells are likely invasive. Specifically, the individual has an intermediate level of risk of cancer metastasis. That is, the risk is greater than a person having a homozygous ARTS1 genotype of EX1@−1125T/T, EX2@397G/G, EX20@1085A/A, EX6@126A/A, EX12@44G/G, EX15@74G/G, EX6@149T/T, EX8@−10A/A, EX9@39T/T, EX9@+18T/T, EX11@59A/A, EX12@−28T/T, EX12@−7A/A, EX15@88C/C, EX19@173C/C, EX19@328m/m, EX19@885T/T, EX20@2105C/C, EX20@719C/C or EX20@1038A/A, but is lower than a person having a homozygous genotype of EX1@−1125C/C, EX2@397C/C, EX20@1085G/G, EX6@126G/G, EX12@44A/A, EX15@74A/A, EX6@149C/C, EX8@−10G/G, EX9@39C/C, EX9@+18C/C, EX1@59G/G, EX12@−28G/G, EX12@−7C/C, EX15@88G/G, EX19@173A/A, EX19@328w/w, EX19@885C/C, EX20@2105T/T, EX20@719T/T or EX20@1038C/C.

[0521] Thus, if the individual is homozygous with the ARTS1 genotype EX1@−1125T/T, EX2@397G/G, EX20@1085A/A, EX6@126A/A, EX12@44G/G, EX15@74G/G, EX6@149T/T, EX8@−10A/A, EX9@39T/T, EX9@+18T/T, EX11@59A/A, EX12@−28T/T, EX12@−7A/A, EX15@88C/C, EX19@173C/C, EX19@328m/m, EX19@885T/T, EX20@2105C/C, EX20@719C/C or EX20@1038A/A, then it can be reasonably predicted that a tumor occurring within this individual has a low metastatic potential, that the cancer has good prognosis, and that the tumor cells are likely not invasive. That is, the individual does not have an increased likelihood or increased risk of cancer metastasis. Similarly, if the individual is homozygous with an ARTS1 genotype at a locus that is in the same haplotype with the SNPs EX6@126A, EX12@44G and EX15@74G (in linkage disequilibrium), or in the same haplotype (linkage disequilibrium) with the SNPs EX6@149T and EX8@−10A, or in the same haplotype (linkage disequilibrium) with the SNPs EX9@39T, EX9@+18T, EX11@59A, EX12@−28T, EX12@−7A and EX15@88C, or in the same haplotype (linkage disequilibrium) with the SNPs EX19@173C, EX19@328m, EX19@885TC and EX20@2105C, or in the same haplotype (linkage disequilibrium) with the SNPs EX20@719C and EX20@1038A, then it can reasonably be predicted that tumors occurring within this individual have a low metastatic potential, that the cancer has good prognosis, and that the tumor cells are likely not invasive. In other words, the individual does not have an increased likelihood, or increased risk for cancer metastasis.

[0522] In another aspect, the present invention encompasses a method for predicting or detecting susceptibility in an individual to cardiovascular disease, which comprises the step of genotyping the individual to determine the individual's ARTS1 genotype at one or more of the loci identified in the present invention, namely EX1@−1125, EX2@397, EX20@1085, EX6@126, EX12@44, EX15@74, EX6@149, EX8@−10, EX9@39, EX9@+18, EX11@59, EX12@−28, EX12@−7, EX15@88, EX19@173, EX19@328, EX19@885, EX20@2105, EX20@719 or EX20@1038; or, at another locus at which the genotype is in linkage disequilibrium with one of the SNPs or haplotypes of the present invention. Thus, if one or more the SNPs EX1@−1125C, EX2@397C, EX20@1085G, EX6@126G, EX12@44A, EX15@74A, EX6@149C, EX8@−10G, EX9@39C, EX9@+18C, EX11@59G, EX12@−28G, EX12@−7C, EX15@88G, EX198173A, EX19@328w, EX19@885C, EX20@2105T, EX20719T or EX20@1038C are detected, or a SNP that is in linkage disequilibrium with any one of such SNPs is detected in the individual, then it can be reasonably predicted that the individual is at an increased risk of developing a cardiovascular disease, particularly high blood pressure, hypertension, cardiac hypertrophy, myocardial damage or coronary heart disease. Particularly, if an individual is homozygous with the ARTS1 genotype EX1@−1125C/C, EX2@397C/C, EX20@1085G/G, EX6@126G/G, EX12@44A/A, EX15@74A/A, EX6@149C/C, EX8@−10G/G, EX9@39C/C, EX9@+18C/C, EX11@59G/G, EX12@−28G/G, EX12@−7C/C, EX15@88G/G, EX19@173A/A, EX19@328w/w, EX19@885C/C, EX20@2105T/T, EX20@719T/T or EX20@1038C/C, then it can be reasonably predicted that the individual has an elevated susceptibility to cardiovascular disease, particularly hypertension, cardiac hypertrophy, myocardial damage and coronary heart disease. Likewise, if the individual is homozygous with a genotype at an ARTS1 locus that is in the same haplotype with the SNPs EX6@126G, EX12@44A and EX15@74A (in linkage disequilibrium), or in the same haplotype (linkage disequilibrium) with the SNPs EX6@149C and EX8@−10G, or in the same haplotype (linkage disequilibrium) with the SNPs EX9@39C, EX9@+18C, EX11@59G, EX12@−28G, EX12@−7C and EX15@88G, or in the same haplotype (linkage disequilibrium) with the SNPs EX19@173A, EX19@328w, EX19@885C and EX20@2105T, or in the same haplotype (linkage disequilibrium) with the SNPs EX20@719T and EX20@1038C, then it can reasonably be predicted that the individual has an elevated susceptibility to cardiovascular disease. In other words, such an individual has an increased likelihood, or is at an increased risk for developing cardiovascular disease. If an individual is heterozygous, then his or her risk of developing cardiovascular disease is at an intermediate level. On the other hand, if the individual is homozygous with the ARTS1 genotype EX1@−1125T/T, EX2@397G/G, EX20@1085A/A, EX6@126A/A, EX12@44G/G, EX15@74G/G, EX6@149T/T, EX8@−10A/A, EX9@39T/T, EX9@+18T/T, EX11@59A/A, EX12@−28T/T, EX12@−7A/A, EX15@88C/C, EX19@173C/C, EX19@328m/m, EX19@885T/T, EX20@2105C/C, EX20@719C/C or EX20@1038A/A, then it can be reasonably predicted that the individual has a reduced susceptibility to cardiovascular disease. Similarly, if the individual is homozygous with a genotype at an ARTS1 locus that is in the same haplotype with the SNPs EX6@126A, EX12@44G and EX15@74G (in linkage disequilibrium), or in the same haplotype (linkage disequilibrium) with the SNPs EX6@149T and EX8@−10A, or in the same haplotype (linkage disequilibrium) with the SNPs EX9@39T, EX9@+18T, EX11@59A, EX12@−28T, EX12@−7A and EX15@88C, or in the same haplotype (linkage disequilibrium) with the SNPs EX19@173C, EX19@328m, EX19@885TC and EX20@2105C, or in the same haplotype (linkage disequilibrium) with the SNPs EX20@719C and EX20@1038A, then it can reasonably be predicted that the individual has a reduced susceptibility to cardiovascular disease, particularly high blood pressure, hypertension, cardiac hypertrophy, myocardial damage and coronary heart disease.

[0523] In another aspect, the present invention provides a method for predicting/determining immune response and/or resistance to viral infection in an individual. The method comprises the step of genotyping the individual to determine the individual's genotype at one or more of the ARTS1 loci identified in the present invention, namely EX1@−1125, EX2@397, EX20@1085, EX6@126, EX12@44, EX15@74, EX6@149, EX8@−10, EX9@39, EX9@+18, EX11@59, EX12@−28, EX12@−7, EX15@88, EX19@173, EX19@328, EX19@885, EX20@2105, EX20719 or EX20@1038; or, at another locus at which the genotype is in linkage disequilibrium with one of the SNPs or haplotypes of the present invention. Thus, if one or more the SNPs EX1@−1125C, EX2@397C, EX20@1085G, EX6@126G, EX12@44A, EX15@74A, EX6@149C, EX8@−10G, EX9@39C, EX9@+18C, EX11@59G, EX12@−28G, EX12@−7C, EX15@88G, EX19@173A, EX19@328w, EX19@885C, EX20@2105T, EX20@719T or EX20@1038C are detected, or a SNP that is in linkage disequilibrium with any one of such SNPs is detected in the individual, then it can be reasonably predicted that the individual will have a reduced immune response and thus, a decreased resistance to viral infection. In other words, the individual has an increased likelihood of developing viral infection. Particularly, if an individual is homozygous with the ARTS1 genotype EX1@−1125C/C, EX2@397C/C, EX20@1085G/G, EX6@126G/G, EX12@44A/A, EX15@74A/A, EX6@149C/C, EX8@−10G/G, EX9@39C/C, EX9@+18C/C, EX11@59G/G, EX12@−28G/G, EX12@−7C/C, EX15@88G/G, EX19@173A/A, EX19@328w/w, EX19@885C/C, EX20@2105T/T, EX20@719T/T or EX20@1038C/C, then the individual has particularly poor immune response, especially to viral infection. Likewise, if the individual is homozygous with a genotype at an ARTS1 locus that is in the same haplotype with the SNPs EX6@126G, EX12@44A and EX15@74A (in linkage disequilibrium), or in the same haplotype (linkage disequilibrium) with the SNPs EX6@149C and EX8@−10G, or in the same haplotype (linkage disequilibrium) with the SNPs EX9@39C, EX9@+18C, EX11@59G, EX12@−28G, EX12@−7C and EX15@88G, or in the same haplotype (linkage disequilibrium) with the SNPs EX19@173A, EX19@328w, EX19@885C and EX20@2105T, or in the same haplotype (linkage disequilibrium) with the SNPs EX20@719T and EX20@1038C, then it can reasonably be predicted that the individual has a diminished immune response and decrease resistance to viral infection. However, if an individual is heterozygous with the genotype EX1@−1125C/T, EX2@397C/G, EX20@1085G/A, EX6@126G/A, EX12@44G/A, EX15@74G/A, EX6@149T/C, EX8@−10G/A, EX9@39C/T, EX9@+18T/C, EX11@59G/A, EX12@−28G/T, EX12@−7C/A, EX15@88G/C, EX19@173C/A, EX19@328w/m, EX19@885C/T, EX20@2105T/C, EX20@719T/C or EX20@1038A/C, then the individual has intermediate immune response. Specifically, the individual has an intermediate level of risk of viral infection. Alternatively, if the individual is homozygous with the ARTS1 genotype EX1@−1125T/T, EX2@397G/G, EX20@1085A/A, EX6@126A/A, EX12@44G/G, EX15@74G/G, EX6@149T/T, EX8@−10A/A, EX9@39T/T, EX9@+18T/T, EX11@59A/A, EX12@−28T/T, EX12@−7A/A, EX15@88C/C, EX19@173C/C, EX19@328 m/m, EX19@885T/T, EX20@2105C/C, EX20@719C/C or EX20@1038A/A, then it can be reasonably predicted that the individual will have a good immune response. In other word, the individual will have a reduced susceptibility to infection, especially viral infection. Similarly, if the individual is homozygous with a genotype at an ARTS1 locus that is in the same haplotype with the SNPs EX6@126A, EX12@44G and EX15@74G (in linkage disequilibrium), or in the same haplotype (linkage disequilibrium) with the SNPs EX6@149T and EX8@−10A, or in the same haplotype (linkage disequilibrium) with the SNPs EX9@39T, EX9@+18T, EX11@59A, EX12@−28T, EX12@−7A and EX15@88C, or in the same haplotype (linkage disequilibrium) with the SNPs EX19@173C, EX19@328m, EX19@885TC and EX20@2105C, or in the same haplotype (linkage disequilibrium) with the SNPs EX20@719C and EX20@1038A, then it can reasonably be predicted that the individual will have a normal immune response to infection, such as viral infection.

[0524] In another aspect, the present invention provides a method for predicting and/or determining susceptibility to inflammatory and autoimmune disease. The method comprises the step of genotyping the individual to determine the individual's genotype at one or more of the ARTS1 loci identified in the present invention, namely EX1@−1125, EX2@397, EX20@1085, EX6@126, EX12@44, EX15@74, EX6@149, EX8@−10, EX9@39, EX9@+18, EX11@59, EX12@−28, EX12@−7, EX15@88, EX19@173, EX19@328, EX19@885, EX20@2105, EX20719 or EX20@1038; or, at another ARTS1 locus which is in linkage disequilibrium with one of the SNPs or haplotypes of the present invention. Thus, if one or more the SNPs EX1@−1125C, EX2@397C, EX20@1085G, EX6@126G, EX12@44A, EX15@74A, EX6@149C, EX8@−10G, EX9@39C, EX9@+18C, EX11@59G, EX12@−28G, EX12@−7C, EX15@88G, EX19@173A, EX19@328w, EX19@885C, EX20@2105T, EX20@719T or EX20@1038C are detected, or a SNP that is in linkage disequilibrium with any one of such SNPs is detected in the individual, then it can be reasonably predicted that the individual will have increased susceptibility to autoimmune disease, particularly endotoxic shock, TNF-dependent arthritis, and encephalomyelitis. Particularly, if an individual is homozygous with the ARTS1 genotype EX1@−1 125C/C, EX2@397C/C, EX20@1085G/G, EX6@126G/G, EX12@44A/A, EX15@74A/A, EX6@149C/C, EX8@−10G/G, EX9@39C/C, EX9@+18C/C, EX11@59G/G, EX12@−28G/G, EX12@−7C/C, EX15@88G/G, EX19@173A/A, EX19@328w/w, EX19@885C/C, EX20@2105T/T, EX20@719T/T or EX20@1038C/C, then the individual has particularly elevated susceptibility to autoimmune disease, especially endotoxic shock, TNF-dependent arthritis, and encephalomyelitis. Likewise, if the individual is homozygous with a genotype at an ARTS1 locus that is in the same haplotype with the SNPs EX6@126G, EX12@44A and EX15@74A (in linkage disequilibrium), or in the same haplotype (linkage disequilibrium) with the SNPs EX6@149C and EX8@−10G, or in the same haplotype (linkage disequilibrium) with the SNPs EX9@39C, EX9@+18C, EX11@59G, EX12@−28G, EX12@−7C and EX15@88G, or in the same haplotype (linkage disequilibrium) with the SNPs EX19@173A, EX19@328w, EX19@885C and EX20@2105T, or in the same haplotype (linkage disequilibrium) with the SNPs EX20@719T and EX20@1038C, then it can reasonably be predicted that the individual has an elevated susceptibility to autoimmune disease, especially endotoxic shock, TNF-dependent arthritis, and encephalomyelitis. However, if an individual is heterozygous with the ARTS1 genotype EX1@−1125C/T, EX2@397C/G, EX20@1085G/A, EX6@126G/A, EX12@44G/A, EX15@74G/A, EX6@149T/C, EX8@−10G/A, EX9@39C/T, EX9@+18T/C, EX1@59G/A, EX12@−28G/T, EX12@−7C/A, EX15@88G/C, EX19@173C/A, EX19@328w/m, EX19@885C/T, EX20@2105T/C, EX20@719T/C or EX20@1038A/C, then the individual has intermediate probability of developing and autoimmune disease. Alternatively, if the individual is homozygous with the ARTS1 genotype EX1@−1125T/T, EX2@397G/G, EX20@1085A/A, EX6@126A/A, EX12@44G/G, EX15@74G/G, EX6@149T/T, EX8@−10A/A, EX9@39T/T, EX9@+18T/T, EX11@59A/A, EX12@−28T/T, EX12@−7A/A, EX15@88C/C, EX19@173C/C, EX19@328m/m, EX19@885T/T, EX20@2105C/C, EX20@719C/C or EX20@1038A/A, then it can be reasonably predicted that the individual will have a decreased likelihood of developing an autoimmune disease, particularly endotoxic shock, TNF-dependent arthritis, and encephalomyelitis. Similarly, if the individual is homozygous with an ARTS1 genotype at a locus that is in the same haplotype with the SNPs EX6@126A, EX12@44G and EX15@74G (in linkage disequilibrium), or in the same haplotype (linkage disequilibrium) with the SNPs EX6@149T and EX8@−10A, or in the same haplotype (linkage disequilibrium) with the SNPs EX9@39T, EX9@+18T, EX11@59A, EX12@−28T, EX12@−7A and EX15@88C, or in the same haplotype (linkage disequilibrium) with the SNPs EX19@173C, EX19@328m, EX19@885TC and EX20@2105C, or in the same haplotype (linkage disequilibrium) with the SNPs EX20@719C and EX20@1038A, then it can reasonably be predicted that the individual has a reduced susceptibility to autoimmune diseases such as endotoxic shock, TNF-dependent arthritis, and encephalomyelitis.

[0525] The SNPs listed in Table 11, i.e. those at positions 96,112,196 and 96,134,750 of chromosome 5, have also been shown to be associated with ARTS1 mRNA levels. Chromosome 5 SNPs associated with lower ARTS1 mRNA expression levels are 96,112,196C and 96,134,750C, whereas those associated with lower ARTS1 mRNA expression are 96,112,196T and 96,134,750T. In addition to those mentioned above, these SNPs may be utilized in the applications described above.

MSR

[0526] As indicated in Table 12 and 45-47 the expression level of the MSR gene in human cells is an inheritable “quantitative trait” with genetic determinants. Furthermore, the SNPs in accordance with the present invention are associated with the “quantitative trait”, i.e., MSR mRNA levels in human cells. Specifically, the SNPs EX1@−674G, EX1@19C, EX1@+129w, EX5@123T, EX5@136C, EX7@146G, EX10@+83G, EX11@+54C, EX14@14T, EX14@106A, EX14@142G and EX15@686A are associated with a “low expression phenotype” while the EX1@−74T, EX1@119T, EX1@+129m, EX5@123C, EX5@136T, EX7@146A, EX10@+83A, EX11@+54T, EX14@14C, EX14@106G, EX14@142A and EX15@686G are associated with a “high expression phenotype.” Thus, the SNPs are particularly useful in predicting the level of MSR gene expression in an individual.

[0527] Thus, in one aspect of the invention a method is provided for predicting or detecting susceptibility to hyperhomocysteinemia, cardiovascular disease, atherosclerosis, recurrent arterial and venous thrombosis, premature coronary artery disease and neural tube defects in an individual, which comprises the steps of genotyping the individual to determine the individual's genotype at one or more loci identified in the present invention wherein one or more of the SNPs are detected in the individual, then it can be predicted whether the individual has an increased risk of developing a metabolic or vascular disease. Thus, if one or more the MSR SNPs EX1@−674G, EX1119C, EX1@+129w, EX5@123T, EX5@136C, EX7@146G, EX10@+83G, EX11@+54C, EX14@14T, EX14@106A, EX14@142G or EX15@686A are detected, or, a SNP that is in linkage disequilibrium with any one of such SNPs is detected in the individual, then it can be reasonably predicted that the individual is at an increased risk of developing disease, particularly hyperhomocysteinemia, cardiovascular disease, atherosclerosis, recurrent arterial and venous thrombosis, premature coronary artery disease and neural tube defects. In particular, if an individual is homozygous with the MSR genotype EX1@−674G/G, EX1@19C/C, EX1@+129w/w, EX5@123T/T, EX5@136C/C, EX7@146G/G, EX10@+83G/G, EX1@+54C/C, EX14@14T/T, EX14@106A/A, EX14@142G/G or EX15@686A/A, or a SNP that is in linkage disequilibrium with any one or more of such SNPs, then it can be reasonably predicted that the individual has an increased susceptibility to hyperhomocysteinemia, cardiovascular disease, atherosclerosis, recurrent arterial and venous thrombosis, premature coronary artery disease and neural tube defects. In other words, such an individual has an increased likelihood or is at an increased risk of developing disease, particularly hyperhomocysteinemia, cardiovascular disease, atherosclerosis, recurrent arterial and venous thrombosis, premature coronary artery disease and neural tube defects. If an individual is heterozygous, then his or her risk of developing the disease is at an intermediate level. On the other hand, if the individual is homozygous with the MSR genotype EX1@−674T/T, EX1@19T/T, EX1@+129m/m, EX5@123C/C, EX5@136T/T, EX7@146A/A, EX10@+83A/A, EX11@+54T/T, EX14@14C/C, EX14@106G/G, EX14@142A/A or EX15@686G/G, or a SNP that is in linkage disequilibrium with any one or more of such SNPs, then it can be reasonably predicted that the individual has a reduced susceptibility to disease, particularly hyperhomocysteinemia, cardiovascular disease, atherosclerosis, recurrent arterial and venous thrombosis, premature coronary artery disease and neural tube defects.

[0528] In another aspect, the present invention provides a method for determining the prognosis of a patient having a hyperhomocysteinemia, cardiovascular disease, atherosclerosis, recurrent arterial and venous thrombosis, premature coronary artery disease and neural tube defects. The individual to be tested can be a healthy person or previously diagnosed individual. The method comprises the step of genotyping the individual to determine the individual's genotype at one or more of the loci identified in the present invention, or another locus at which the genotype is in linkage disequilibrium with one of the SNPs or haplotypes of the present invention. Thus, if one or more the MSR SNPs EX1@−674G, EX1@19C, EX1@+129w, EX5@123T, EX5@136C, EX7@146G, EX10@+83G, EX11@+54C, EX14@14T, EX14@106A, EX14@142G or EX15@686A are detected, or a SNP that is in linkage disequilibrium with any one of such SNPs is detected in the individual, then it can be reasonably predicted that the individual has high potential of disease progression and that the prognosis for the individual is poor. In other words, the individual has an increased likelihood or an increased risk of developing the disease and of disease progression. Particularly, if an individual is homozygous with the MSR genotype EX1@−674G/G, EX1@19C/C, EX1@+129w/w, EX5@123T/T, EX5@136C/C, EX7@146G/G, EX10@+83G/G, EX11@+54C/C, EX14@14T/T, EX14@106A/A, EX14@142G/G or EX15@686A/A, or a SNP that is in linkage disequilibrium with any one or more of such SNPs, then the individual has particularly poor prognosis and the disease will likely progress at an increased rate. In other words, the individual has a substantially increased likelihood or a substantially increased risk of disease progression. However, if an individual is heterozygous with the MSR genotype EX1@−674T/G, EX1@19T/C, EX1@+129m/m, EX5@123C/T, EX5@136T/C, EX7@146G/A, EX10@+83G/A, EX11@+54C/T, EX14@14C/T, EX14@106A/G, EX14@142G/A or EX15@686A/G, or is heterozygous with a SNP that is in linkage disequilibrium with any one or more of such SNPs, then the individual has an intermediate prognosis. Specifically, the individual has an intermediate level of disease progression.

[0529] Thus, if the individual is homozygous with the MSR genotype EX1@−674T/T, EX1@19T/T, EX1@+129m/m, EX5@123C/C, EX5@136T/T, EX7@146A/A, EX10@+83A/A, EX11@+54T/T, EX14@14C/C, EX14@106G/G, EX14@142A/A or EX15@686G/G is detected, or is homozygous with a SNP that is in linkage disequilibrium with any one or more of such SNPs, then it can be reasonably predicted that disease prognosis is favorable. That is, the individual does not have an increased likelihood or increased risk of hyperhomocysteinemia, cardiovascular disease, atherosclerosis, recurrent arterial and venous thrombosis, premature coronary artery disease and neural tube defects.

[0530] In another aspect, the present invention encompasses a method for predicting or detecting cancer susceptibility in an individual, which comprises the step of genotyping the individual to determine the individual's genotype at one or more of the loci identified in the present invention, or another locus at which the genotype is in linkage disequilibrium with one of the SNPs of the present invention. Thus, if one or more the MSR SNPs EX1@−674T, EX1@19T, EX1@+129m, EX5@123C, EX5@136T, EX7@146A, EX10@+83A, EX11@+54T, EX14@14C, EX14@106G, EX14@142A or EX15@686G is detected, or a SNP that is in linkage disequilibrium with any one of such SNPs is detected in the individual, then it can be reasonably predicted that the individual is at an increased risk of developing cancer, particularly colon cancer. In particular, if an individual is homozygous with the MSR genotype EX11@−674T/T, EX1@19T/T, EX1@+129m/m, EX5@123C/C, EX5@136T/T, EX7@146A/A, EX10@+83A/A, EX11@+54T/T, EX14@14C/C, EX14@106G/G, EX14@142A/A or EX15@686G/G is detected, or a SNP that is in linkage disequilibrium with any one or more of such SNPs, then it can be reasonably predicted that the individual has an elevated susceptibility to cancer, particularly colon cancer. In other words, such an individual has an increased likelihood or is at an increased risk of developing cancer, particularly colon cancer. If an individual is heterozygous, then his or her risk of developing cancer is at an intermediate level. On the other hand, if the individual is homozygous with the MSR genotype EX1@−674G/G, EX1@19C/C, EX1@+129w/w, EX5@123T/T, EX5@136C/C, EX7@146G/G, EX10@+83G/G, EX11@+54C/C, EX14@14T/T, EX14@106A/A, EX14@142G/G or EX15@686A/A, then it can be reasonably predicted that the individual has a reduced susceptibility to cancer, particularly colon cancer.

[0531] In another aspect, the present invention provides a method for identifying high-risk patients who have cancerous growths with a poor prognosis of recovery, or for predicting/determining the invasiveness and metastatic potential of tumors within a patient, particularly cancer patient, e.g., with non-small cell lung cancers (NSCLCs). The individual to be tested can be a healthy person or an individual diagnosed with cancer. In this aspect of the invention, the methods comprise the step of genotyping the cancerous growth within the individual to determine the tumor's genotype at one or more of the MSR loci identified in the present invention, namely those listed above, or another locus at which the genotype is in linkage disequilibrium with one of the SNPs of the present invention. Thus, if one or more the MSR SNPs EX1@−674T, EX1@19T, EX1@+129m, EX5@123C, EX5@136T, EX7@146A, EX10@+83A, EX11@+54T, EX14@14C, EX14@106G, EX14@142A or EX15@686G are detected, or a SNP that is in linkage disequilibrium with any one of such SNPs is detected in the tumor, then it can be reasonably predicted that the tumor has high metastatic potential, that the individual has poor prognosis, and that the tumor cells are likely invasive and given to robust growth. In other words, the individual has an increased likelihood or an increased risk of cancer metastasis and further growth. Particularly, if the tumor is homozygous with the genotype EX1@−674T/T, EX1@19T/T, EX1@+129m/m, EX5@123C/C, EX5@136T/T, EX7@146A/A, EX10@+83A/A, EX11@+54T/T, EX14@14C/C, EX14@106G/G, EX14@142A/A or EX15@686G/G, then the individual has particular poor prognosis and the tumor cells are likely highly invasive and given to robust growth. In other words, the individual has a substantially increased likelihood or a substantially increased risk of cancer metastasis and aggressive tumor growth. However, if the tumor is heterozygous with the genotype EX1@−674T/G, EX1@19T/C, EX1@+129m/w, EX5@123C/T, EX5@136T/C, EX7@146G/A, EX10@+83G/A, EX11@+54C/T, EX14@14C/T, EX14@106A/G, EX14@142G/A or EX15@686A/G, then the individual has an intermediate prognosis and the tumor cells are potentially invasive. Specifically, the individual has an intermediate level of risk of cancer metastasis and further tumor growth. On the other hand, if the tumor is homozygous with the genotype EX1@−674G/G, EX1@19C/C, EX1@+129w/w, EX5@123T/T, EX5@136C/C, EX7@146G/G, EX10@+83G/G, EX11@+54C/C, EX14@14T/T, EX14@106A/A, EX14@142G/G or EX15@686A/A, then it can be reasonably predicted that the tumor in the individual has low metastatic potential, that the patient has good prognosis, and that the tumor cells are likely not invasive or robust. That is, the individual does not have an increased likelihood or increased risk of cancer metastasis and rapid tumor growth.

[0532] The SNP on Chromosome V at position 7,952,909 has also been shown to be associated with MSR mRNA levels. The Chromosome V SNP associated with lower MSR mRNA expression levels is 7,952,909G, whereas that associated with higher mRNA expression levels is 7,952,909C. In addition to those mentioned above, these SNPs may be utilized in the applications described above.

AKAP9

[0533] As indicated in Tables 13-14 and 48-55, the expression level of the AKAP9 gene in human cells is an inheritable “quantitative trait” with genetic determinants. Furthermore, the SNPs in accordance with the present invention are associated with the “quantitative trait”, i.e., mRNA level of the AKAP9 gene in human cells. Specifically, the SNPs EX1@−63C, EX1@99G, EX2@+3C, EX9@459T, EX10@186G, EX15@53m, EX16@−59G, EX18@−41G, EX23@−20A, EX26@14T, EX32@+8T, EX34@−45G, EX35@215G, EX35@+8T, EX39@121T, EX44@28C, EX45@−38A, EX50@+58A, EX19@1011C, EX19@1020G, EX19@1033G, EX36@19T, EX40@470A, EX40@910T and EX40@1055G are associated with a “low expression phenotype” while the EX1@−63T, EX1@99C, EX2@+3A, EX9@459G, EX10@186A, EX15@53w, EX16@−59C, EX18@−41T, EX23@−20G, EX26@14C, EX32@+8C, EX34@−45A, EX35@215A, EX35@+8A, EX39@121C, EX44@28A, EX45@−38G, EX50@+58T, EX19@1011T, EX19@1020A, EX19@1033A, EX36@19C, EX40@470G, EX40@910C and EX40@1055A are associated with a “high expression phenotype.” Thus, the SNPs are particularly useful in predicting the level of AKAP9 gene expression in an individual.

[0534] Thus, in one aspect, the present invention encompasses a method for predicting or detecting cancer susceptibility in an individual, which comprises the step of genotyping the individual to determine the individual's genotype at one or more of the AKAP9 loci identified in the present invention, namely EX1@63, EX1@99, EX2@+3, EX9@459, EX10@186, EX15@53, EX16@−59, EX18@−41, EX23-20, EX26@14, EX32@+8, EX34@−45, EX35@215, EX35@+8, EX39@121, EX44@28, EX45@−38, EX50@+58, EX19@1011, EX19@1020, EX19@1033, EX36@19, EX40@470, EX40@910 or EX40@1055, or another locus at which the genotype is in linkage disequilibrium with one of the SNPs of the present invention. Thus, if one or more of the AKAP9 SNPs EX1@163T, EX1@99C, EX2@+3A, EX9@459G, EX10@186A, EX15@53w, EX16@−59C, EX18@−41T, EX23@−20G, EX26@14C, EX32@+8C, EX34@−45A, EX35@2215A, EX35@+8A, EX39@121C, EX44@28A, EX45@−38G, EX50@+58T, EX19@1011T, EX19@1020A, EX19@1033A, EX36@19C, EX40@470G, EX40@910C or EX40@1055A are detected, or a SNP that is in linkage disequilibrium with any one of such SNPs is detected in the individual, then it can be reasonably predicted that the individual is at an increased risk of developing cancer. In particular, if an individual is homozygous with the AKAP9 genotype EX1@63T/T, EX1@99C/C, EX2@+3A/A, EX9@459G/G, EX10@186A/A, EX15@53w/w, EX16@−59C/C, EX18@−41T/T, EX23@−20G/G, EX26@14C/C, EX32@+8C/C, EX34@−45A/A, EX35@215A/A, EX35@+8A/A, EX39@121C/C, EX44@28A/A, EX45@−38G/G, EX50@+58T/T, EX19@1011T/T, EX19@1020A/A, EX19@1033A/A, EX36@19C/C, EX40@470G/G, EX40@910C/C or EX40@1055A/A, then it can be reasonably predicted that the individual has an elevated susceptibility to cancer. In other words, such an individual has an increased likelihood or is at an increased risk of developing cancer, particularly skin cancer. If an individual is heterozygous, then his or her risk of developing cancer is at an intermediate level. One the other hand, if the individual is homozygous with the AKAP9 genotype EX1@63C/C, EX1@99G/G, EX2@+3C/C, EX9@459T/T, EX10@186G/G, EX15@53m/m, EX16@−59G/G, EX18@−41G/G, EX23@−20A/A, EX26@14T/T, EX32@+8T/T, EX34@−45G/G, EX@215G/G, EX@+8T/T, EX39@121T/T, EX44@28C/C, EX45@−38A/A, EX50@+58A/A, EX19@1011C/C, EX19@1020G/G, EX19@1033G/G, EX36@19T/T, EX40@470A/A, EX40@910T/T or EX40@1055G/G, then it can be reasonably predicted that the individual has a reduced susceptibility of developing cancer.

[0535] In another aspect, the present invention encompasses a method for predicting or detecting susceptibility to neurological disorders in an individual, which comprises the step of genotyping the individual to determine the individual's genotype at one or more of the AKAP9 loci identified in the present invention, namely EX1@63, EX1@99, EX2@+3, EX9@459, EX1@186, EX15@53, EX16@−59, EX18@−41, EX23@−20, EX26@14, EX32@+8, EX34@−45, EX35@215, EX35@+8, EX39@121, EX44@28, EX45@−38, EX50@+58, EX19@1011, EX19@1020, EX19@1033, EX36@19, EX40@470, EX40@910 or EX40@1055, or another locus at which the genotype is in linkage disequilibrium with one of the SNPs of the present invention. Thus, if one or more of the AKAP9 SNPs EX1@−63C, EX1@99G, EX2@+3C, EX9@459T, EX10@186G, EX15@53m, EX16@−59G, EX18@−41G, EX23@−20A, EX26@14T, EX32@+8T, EX34@−45G, EX@215G, EX@+8T, EX39@121T, EX44@28C, EX45@−38A, EX50@+58A, EX19@1011C, EX19@1020G, EX19@1033G, EX36@19T, EX40@470A, EX40@910T or EX40@1055G are detected, or a SNP that is in linkage disequilibrium with any one of such SNPs is detected in the individual, then it can be reasonably predicted that the individual is at an increased risk of developing neurological disorders, particularly AD, ALS, dementia, Creutzfeldt-Jakob disease, Pick's disease and neurodegeneration caused by aging. In particular, if an individual is homozygous with the AKAP9 genotype EX1@63C/C, EX1@99G/G, EX2@+3C/C, EX9@459T/T, EX10@186G/G, EX15@53m/m, EX16@−59G/G, EX18@−41G/G, EX23@−20A/A, EX26@14T/T, EX32@+8T/T, EX34@−45G/G, EX@215G/G, EX@+8T/T, EX39@121T/T, EX44@28C/C, EX45@−38A/A, EX50@+58A/A, EX19@1011C/C, EX19@1020G/G, EX19@1033G/G, EX36@19T/T, EX40@470A/A, EX40@910T/T or EX40@1055G/G, then it can be reasonably predicted that the individual has an elevated susceptibility to neurological disorders. In other words, such an individual has an increased likelihood or is at an increased risk of developing neurological disorders, particularly AD, ALS, dementia, Creutzfeldt-Jakob disease, Pick's disease and neurodegeneration caused by aging. If an individual is heterozygous, then his or her risk of developing neurological disorders is at an intermediate level. One the other hand, if the individual is homozygous with the AKAP9 genotype EX1@63T/T, EX1@99C/C, EX2@+3A/A, EX9@459G/G, EX10@186A/A, EX15@53w/w, EX16@−59C/C, EX18@−41T/T, EX23@−20G/G, EX26@14C/C, EX32@+8C/C, EX34@−45A/A, EX35@215A/A, EX35@+8A/A, EX39@121C/C, EX44@28A/A, EX45@−38G/G, EX50@+58T/T, EX19@1011T/T, EX19@1020A/A, EX19@1033A/A, EX36@19C/C, EX40@470G/G, EX40@910C/C or EX40@1055A/A, then it can be reasonably predicted that the individual has a reduced susceptibility to neurological disorders, particularly AD, ALS, dementia, Creutzfeldt-Jakob disease, Pick's disease and neurodegeneration caused by aging.

[0536] In yet another aspect, the present invention encompasses a method for predicting or detecting an individual's susceptibility to heart disease, which comprises the step of genotyping the individual to determine the individual's genotype at one or more of the AKAP9 loci identified in the present invention, namely EX1@63, EX1@99, EX2@+3, EX9@459, EX10@186, EX15@53, EX16@−59, EX18@−41, EX23@−20, EX26@14, EX32@+8, EX34@−45, EX35@215, EX35@+8, EX39@121, EX44@28, EX45@−38, EX50@+58, EX19@1011, EX19@1020, EX19@1033, EX36@19, EX40@470, EX40@910 or EX40@1055, or another locus at which the genotype is in linkage disequilibrium with one of the SNPs of the present invention. Thus, if one or more of the AKAP9 SNPs EX1@63C, EX1@99G, EX2@+3C, EX9@459T, EX10@186G, EX15@53m, EX16@−59G, EX18@−41G, EX23@−20A, EX26@14T, EX32@+8T, EX34@−45G, EX@215G, EX@+8T, EX39@121T, EX44@28C, EX45@−38A, EX50@+58A, EX19@1011C, EX19@1020G, EX19@1033G, EX36@19T, EX40@470A, EX40@910T or EX40@1055G are detected, or a SNP that is in linkage disequilibrium with any one of such SNPs is detected in the individual, then it can be reasonably predicted that the individual is at an increased risk of heart disease, especially arrhythmia, long QT syndrome, ventricular fibrillation, cardiac arrest and sudden death. In particular, if an individual is homozygous with the AKAP9 genotype EX1163C/C, EX1@99G/G, EX2@+3C/C, EX9@459T/T, EX10@186G/G, EX15@53m/m, EX16@−59G/G, EX18@−41G/G, EX23@−20A/A, EX26@14T/T, EX32@+8T/T, EX34@−45G/G, EX@215G/G, EX@+8T/T, EX39@121T/T, EX44@28C/C, EX45@−38A/A, EX50@+58A/A, EX19@1011C/C, EX19@1020G/G, EX19@1033G/G, EX36@19T/T, EX40@470A/A, EX40@910T/T or EX40@1055G/G, then it can be reasonably predicted that the individual has an elevated susceptibility to heart disease, especially arrhythmia, long QT syndrome, ventricular fibrillation, cardiac arrest and sudden death. If an individual is heterozygous, then his or her risk of developing heart disease is at an intermediate level. One the other hand, if the individual is homozygous with the AKAP9 genotype EX1@63T/T, EX1@99C/C, EX2@+3A/A, EX9@459G/G, EX10@186A/A, EX15@53w/w, EX16@−59C/C, EX18@−41T/T, EX23@−20G/G, EX26@14C/C, EX32@+8C/C, EX34@−45A/A, EX35@215A/A, EX35@+8A/A, EX39@121C/C, EX44@28A/A, EX45@−38G/G, EX50@+58T/T, EX19@1011T/T, EX19@1020A/A, EX19@1033A/A, EX36@19C/C, EX40@470G/G, EX40@910C/C or EX40@1055A/A, then it can be reasonably predicted that the individual has a reduced susceptibility to heart disease such as arrhythmia, long QT syndrome, ventricular fibrillation, cardiac arrest and sudden death.

[0537] A further aspect of the present invention provides a method for predicting or detecting susceptibility to depression in an individual, comprising the step of genotyping the individual to determine the individual's genotype at one or more of the AKAP9 loci identified in the present invention, namely EX1@63, EX1@99, EX2@+3, EX9@459, EX10@186, EX15@53, EX16@−59, EX18@−41, EX23@−20, EX26@14, EX32@+8, EX34@−45, EX35@215, EX35@+8, EX39@121, EX44@28, EX45@−38, EX50@+58, EX19@1011, EX19@1020, EX19@1033, EX36@19, EX40@470, EX40@910 or EX40@1055, or another locus at which the genotype is in linkage disequilibrium with one of the SNPs of the present invention. Thus, if one or more of the AKAP9 SNPs EX1@63T, EX1@99C, EX2@+3A, EX9@459G, EX10@186A, EX15@53w, EX16@−59C, EX18@−41T, EX23@−20G, EX26@14C, EX32@+8C, EX34@−45A, EX35@215A, EX35@+8A, EX39@121C, EX44@28A, EX45@−38G, EX50@+58T, EX19@1011T, EX19@1020A, EX19@1033A, EX36@19C, EX40@470G, EX40@910C or EX40@1055A are detected, or a SNP that is in linkage disequilibrium with any one of such SNPs is detected in the individual, then it can be reasonably predicted that the individual has an increased susceptibility to depression. In particular, if an individual is homozygous with the AKAP9 genotype EX1@63T/T, EX1@99C/C, EX2@+3A/A, EX9@459G/G, EX10@186A/A, EX15@53w/w, EX16@−59C/C, EX18@−41T/T, EX23@−20G/G, EX26@14C/C, EX32@+8C/C, EX34@−45A/A, EX35@215A/A, EX35@+8A/A, EX39@121C/C, EX44@28A/A, EX45@−38G/G, EX50@+58T/T, EX19@1011T/T, EX19@1020A/A, EX19@1033A/A, EX36@19C/C, EX40@470G/G, EX40@910C/C or EX40@1055A/A, then it can be reasonably predicted that the individual has an elevated susceptibility to depression. If an individual is heterozygous, then his or her risk of developing depression is at an intermediate level. One the other hand, if the individual is homozygous with the AKAP9 genotype EX1@63C/C, EX1@99G/G, EX2@+3C/C, EX9@459T/T, EX10@186G/G, EX15@53m/m, EX16@−59G/G, EX18@−41G/G, EX23@−20A/A, EX26@14T/T, EX32@+8T/T, EX34@−45G/G, EX@215G/G, EX@+8T/T, EX39@121T/T, EX44@28C/C, EX45@−38A/A, EX50@+58A/A, EX19@1011C/C, EX19@1020G/G, EX19@1033G/G, EX36@19T/T, EX40@470A/A, EX40@910T/T or EX40@1055G/G, then it can be reasonably predicted that the individual has a reduced susceptibility to depression.

DNAJD1

[0538] As indicated in Tables 15, 16, 57 and 58, the expression level of the DNAJD1 gene in human cells is an inheritable “quantitative trait” with genetic determinants. Furthermore, the SNPs and/or haplotypes in accordance with the present invention are associated with the “quantitative trait”, i.e., DNAJD1 mRNA levels in human cells. Specifically, the SNPs EX1@368T, EX1@527G and EX5@+72m are associated with a “low expression phenotype” while the EX1@368C, EX1@527A and EX5@+72w are associated with a “high expression phenotype.” Thus, the SNPs and/or haplotypes are particularly useful in predicting the level of DNAJD1 gene expression in an individual.

[0539] Thus, in one aspect, the present invention encompasses a method for predicting or detecting cancer susceptibility in a patient, which comprises the step of genotyping the individual to determine the individual's genotype at one or more of the DNAJD1 loci identified in the present invention, namely EX1@368, EX1527 or EX5@+72, or another locus at which the genotype is in linkage disequilibrium with one of these SNPs. Thus, if one or more the DNAJD1 SNPs EX1@368T, EX1527G or EX5@+72m are detected, or a SNP that is in linkage disequilibrium with any one of such SNPs is detected in the individual, then it can be reasonably predicted that the individual is at an increased risk of developing cancer, particular ovarian cancer. In particular, if an individual is homozygous with the DNAJD1 genotype SNPs EX1@368T/T, EX1@527G/G or EX5@+72m/m, then it can be reasonably predicted that the individual has an elevated susceptibility to cancer, particularly ovarian cancer. In other words, such an individual has an increased likelihood or is at an increased risk of developing cancer. If an individual is heterozygous, then his or her risk of developing cancer is at an intermediate level. One the other hand, if the individual is homozygous with the DNAJD1 genotype SNPs EX1@368C/C, EX1@527A/A or EX5@+72w/w, then it can be reasonably predicted that the individual has a reduced susceptibility to cancer, particularly ovarian cancer.

[0540] In another aspect, the present invention provides a method for identifying high-risk patients who have cancer with a poor prognosis, or for the prognosis of a specific cancer, or predicting/determining the invasiveness and metastatic potential of a tumor in a patient, particularly cancer patient, e.g., an ovarian cancer patient. The individual to be tested can be a healthy person or an individual diagnosed with cancer. The method comprises the step of genotyping the individual to determine the individual's genotype at one or more of the DNAJD1 loci identified in the present invention, namely SNPs EX1@368, EX1@527 or EX5@+72, or another locus at which the genotype is in linkage disequilibrium with one of the SNPs of the present invention. Thus, if one or more the DNAJD1 SNPs EX1@368T, EX1@527G or EX5@+72m are detected, or a SNP that is in linkage disequilibrium with any one of such SNPs is detected in the a cancer patient, then it can be reasonably predicted that the patient's tumor has a high metastastic potential, that the patient has a poor prognosis, and that the tumor cells are likely to be invasive. In other words, the individual has an increased likelihood, or has an increased risk, of cancer metastasis. Particularly, if an individual is homozygous with the DNAJD1 genotype EX1@368T/T, EX1@527G/G or EX5@+72m/m, then the individual has particularly poor prognosis, and the tumor cells are likely to be highly invasive. In other words, the individual has a substantially increased likelihood, or a substantially increased risk for cancer metastasis. However, if an individual is heterozygous with the genotype EX1@368T/C, EX1@527G/A or EX5@+72m/w, then the patient has an intermediate prognosis, and their tumor cells are potentially invasive. Specifically, the individual has an intermediate level of risk of cancer metastasis. That is, the risk is greater than a person having a homozygous DNAJD1 genotype of EX1@368C/C, EX1@527A/A or EX5@+72w/w, but is lower than a person having a homozygous genotype of EX1@368T/T, EX1@527G/G or EX5@+72m/m.

[0541] Thus, if the individual is homozygous with the DNAJD1 genotype EX1@368C/C, EX1@527A/A or EX5@+72w/w, then it can be reasonably predicted that the tumor in the individual has low metastatic potential, that the patient has a good prognosis and that the tumor cells are likely not invasive. That is, the individual does not have an increased likelihood or increased risk of cancer metastasis.

[0542] In yet another aspect of the present invention, a method is provided for predicting drug response in a patient to treatment with one or more anti-tumor agents. Examples of such drugs are chemotherapeutics including, but not limited to pacilitaxel, topotecan and cisplatin. Thus, in accordance with the present invention, the DNAJD1 gene of a patient, in need of treatment with an anti-cancer agent, is genotyped to determine the genotype at one or more of the DNAJD1 loci identified in the present invention, namely EX1@368, EX1@1527 or EX5@+72, or another locus at which a genotype is in linkage disequilibrium with one of these SNPs. Thus, if one or more the SNPs EX1@368C, EX1@527A or EX5@+72w are detected, or a SNP that is in linkage disequilibrium with any one of such SNPs is detected in the individual patient, then it can be reasonably predicted that the individual's cancer is likely to respond to treatment with an anti-tumor agent. In other words, once an anti-tumor agent is administered, there is an increased likelihood that the inhibitor will cause a positive effect in the individual, including, e.g., shrinkage or elimination of tumor, increased death of tumor cells, etc.

[0543] Particularly, if an individual is homozygous with the DNAJD1 genotype EX1@368C/C, EX1@527A/A or EX5@+72w/w, then the individual has a substantially increased likelihood of being responsive to treatment with an anti-tumor agent, e.g., paclitaxel, topotecan or cisplatin. If an individual is heterozygous with the genotype EX1@368C/T, EX1@527A/G or EX5@+72m/w, then the individual is still likely to respond to an anti-tumor agent. Specifically, the individual has an intermediate level of responsiveness to anti-tumor agents. That is, the degree of responsiveness is likely to be greater than that in a person having a homozygous genotype of EX1@368T/T, EX1@527G/G or EX5@+72m/m, but is lower than a person having a homozygous genotype of EX1@368C/C, EX1@527A/A or EX5@+72w/w. Thus, if the individual is homozygous with the DNAJD1 genotype EX1@368T/T, EX1@527G/G or EX5@+72m/m, then it can be reasonably predicted that there is an increased likelihood that the individual exhibits a low responsiveness to treatment with a anti-tumor agent.

[0544] In specific embodiments, the individual in need of an anti-tumor agent is diagnosed as having cancer, e.g., ovarian cancer. Also, in certain embodiments, the anti-tumor agent is a chemotherapeutic. In certain examples, such a chemotherapeutic agents are selected from pacilitaxel, topotecan or cisplatin.

[0545] Once the prognosis of a patient's response to anti-tumor agent is made, suitable treatment regimens (e.g., dosage and frequency of administration, and the like) can be decided based on the predicted responsiveness of the patient. For example, if the DNAJD1 gene genotyping result suggests a low responsiveness by the patient to anti-tumor agent, then a higher dosage of anti-tumor agent would be desirably to the patient, or it may be simply decided that another class of drugs would be more suitable for the patient. Thus, in another aspect of the invention, a method is provided for determining a dosage of a anti-tumor agent to be administered to a patient, comprising determining the individual's genotype at one or more of the DNAJD1 loci identified in the present invention, namely EX1@368, EX1@527 or EX5@+72, or another locus at which the genotype is in linkage disequilibrium with one of these SNPs, to determine the likely responsiveness of the patient, and determining accordingly the dosage of a anti-tumor agent to be administered to the patient, wherein the presence of one or more of the SNPs EX1@368C, EX1@527A or EX5@+72w, or a SNP that is in linkage disequilibrium with any one of such SNPs would indicate that the patient is likely to respond to said anti-tumor agent at a lower dosage than another patient without the nucleotide variants. In one embodiment, the method is used in treating ovarian cancer. In other embodiments, the method is used in treating breast cancer, melanoma, lung cancer, brain cancer, neuroblastoma, uterine cancer, leukemia, lymphoma, head and neck cancer, thyroid cancer, gastrointestinal cancer, pancreatic cancer, liver cancer, etc.

[0546] In another aspect of the invention, a method is provided for selecting an anti-cancer treatment for a particular patient's tumor(s), which comprises determining, in a DNAJD1 gene from a tumor sample isolated from the patient, the presence or absence of a nucleotide variant that is selected from the group consisting of EX1@368C, EX1@527A and EX5@+72w, or a SNP that is in linkage disequilibrium with any one of such SNPs, wherein the presence of said nucleotide variant would indicate that the patient is likely to respond to an anti-tumor agent. Thus, if the DNAJD1 gene of the patient's tumor contains one or more of the nucleotide variants of the present invention, then physicians may decide, based on the tumor genotyping result, whether it would be desirable to treat the patient with anti-tumor agents, particularly chemotherapeutics, such as pacilitaxel, topotecan or cisplatin. In one embodiment, the selection of treatment with an anti-tumor agent is based on the presence of a homozygous genotype of one or more of the above SNPs.

[0547] In yet another aspect of the present invention, a method is provided for selecting candidate human subjects for participation in a clinical trial involving a DNAJD1 inhibitor, which comprises (1) determining, in the DNAJD1 gene of a tumor sample from an individual patient, the presence or absence of a nucleotide variant that is selected from the group consisting of EX1@368C, EX1@527A and EX5@+72w, or a SNP that is in linkage disequilibrium with any one of such SNPs, wherein the presence of said nucleotide variant would indicate that the patient's tumor is likely to respond to a anti-tumor agent, such as pacilitaxel, topotecan or cisplatin; and (2) deciding whether to include said individual patient in the clinical trial. For example, if the patient's tumor has one or more of the nucleotide variants, then clinical trial for an anti-tumor agent may include that patient, particularly when the patient's tumor is homozygous in one or more of the SNPs.

[0548] In another aspect, the present invention encompasses a method for predicting or detecting susceptibility to neurodegenerative disease in a patient, which comprises the step of genotyping the individual to determine the individual's genotype at one or more of the DNAJD1 loci identified in the present invention, namely EX1@368, EX1@527 and EX5@+72, or another locus at which the genotype is in linkage disequilibrium with any one of these SNPs. Thus, if one or more the SNPs EX1@368T, EX1@527G or EX5@+72m are detected, or a SNP that is in linkage disequilibrium with any one of such SNPs is detected in the individual, then it can be reasonably predicted that the individual has increased risk of neurodegenerative disease, especially Alzheimer's disease, Parkinson's disease, Huntington's disease, prion disorders, CJD, DRPLA, SCA1, SCA3, schizophrenia and depression. In particular, if an individual is homozygous with the DNAJD1 genotype SNPs EX1@368T/T, EX1@527G/G or EX5@+72m/m, then it can be reasonably predicted that the individual has an elevated susceptibility to neurodegenerative disease. In other words, such an individual has an increased likelihood or is at an increased risk of developing a neurodegenerative disease. If an individual is heterozygous, then his or her risk of developing a neurodegenerative disease, particularly, Alzheimer's disease, Parkinson's disease, Huntington's disease, prion disorders, CJD, DRPLA, SCA1, SCA3, schizophrenia or depression is at an intermediate level. One the other hand, if the individual is homozygous with the DNAJD1 genotype SNPs EX1@368C/C, EX1@527A/A or EX5@+72w/w, then it can be reasonably predicted that the individual has a reduced susceptibility to neurodegenerative disease, such as Alzheimer's disease, Parkinson's disease, Huntington's disease, prion disorders, CJD, DRPLA, SCA1, SCA3, schizophrenia and depression.

[0549] In another aspect, the present invention provides a method for identifying high-risk patients who have a poor prognosis of a neurodegenerative or neurological disease, or for the prognosis of neurodegenerative or neurological disease, or predicting/determining the ability to recover from neuronal damage resulting from brain trauma. The individual to be tested can be a healthy person or an individual diagnosed with a neurodegenerative disease, or suffering from Alzheimer's disease, Parkinson's disease, Huntington's disease, prion disorders, CJD, DRPLA, SCA1, SCA3, schizophrenia and depression. The method comprises the step of genotyping the individual to determine the individual's genotype at one or more of the DNAJD1 loci identified in the present invention, namely SNPs EX1@368C, EX1@527A or EX5@+72w, or another locus at which the genotype is in linkage disequilibrium with one of the SNPs of the present invention. Thus, if one or more of the DNAJD1 SNPs EX1@368C, EX1@527A or EX5@+72w are detected, or a SNP that is in linkage disequilibrium with any one of such SNPs is detected in the individual, then it can be reasonably predicted that the individual has a decreased likelihood of neurological or neurodegenerative disease, especially Alzheimer's disease, Parkinson's disease, Huntington's disease, prion disorders, CJD, DRPLA, SCA1, SCA3, schizophrenia and depression, or the individual will have a reasonable recovery from neuronal damage resulting from brain trauma. Alternatively, if an individual is homozygous with the DNAJD1 genotype EX1@368T/T, EX1@527G/G or EX5@+72m/m, then the individual can reasonably be assumed to have a particular poor prognosis of neurodegenerative disease, or a protracted or incomplete recovery from neuronal damage resulting from brain trauma. In other words, the individual has a substantially increased likelihood of or is at a substantially increased risk of progression of the neurodegenerative disease or neurological damage. However, if an individual is heterozygous with the DNAJD1 genotype EX1@368T/C, EX1@527G/A or EX5@+72m/w, an intermediate level of risk of neurological disease, especially neurodegeneration, Alzheimer's disease, Parkinson's disease, Huntington's disease, prion disorders, CJD, DRPLA, SCA1, SCA3, schizophrenia and depression. That is, the risk is higher than a person having a homozygous DNAJD1 genotype of EX1@368C/C, EX1@527A/A or EX5@+72w/w, but is lower than a person having a homozygous genotype of EX1@368T/T, EX1@527G/G or EX5@+72m/m. Alternatively, if the individual is homozygous with the DNAJD1 genotype EX1@368C/C, EX1@527A/A or EX5@+72w/w, then it can be reasonably predicted that the individual does not have an increased likelihood or increased risk of neurodegenerative disease or neurological disease.

[0550] In yet another aspect, the present invention encompasses a method for predicting or detecting ischemic or ischemic-type injury in an individual, which comprises the step of genotyping the individual to determine the individual's genotype at one or more of the DNAJD1 loci identified in the present invention, namely EX1@368, EX1@527 or EX5@+72, or another locus at which the genotype is in linkage disequilibrium with one of these SNPs. Thus, if one or more the DNAJD1 SNPs EX1@368T, EX1@527G or EX5@+72m are detected, or a SNP that is in linkage disequilibrium with any one of such SNPs is detected in the individual, it can be reasonably predicted that the individual is at an increased risk of ischemic or ischemic-type injury, particularly cardiomyopathy, coronary disease, coronary artery disease, heart attack, stroke, and intestinal ischemia. In particular, if an individual is homozygous with the DNAJD1 genotype EX1@368T/T, EX1@527G/G or EX5@+72m/m, then it can be reasonably predicted that the individual has an elevated susceptibility to ischemia or ischemic-type injury, particularly cardiomyopathy, coronary disease, coronary artery disease, heart attack, stroke, and intestinal ischemia. If an individual is heterozygous, then his or her risk of developing ischemia or ischemic-type injury is at an intermediate level. On the other hand, if the individual is homozygous with the DNAJD1 genotype EX1@368C/C, EX1@527A/A or EX5@+72w/w, then it can be reasonably predicted that the individual has a reduced susceptibility to ischemia or ischemic-type injury, particularly cardiomyopathy, coronary disease, coronary artery disease, heart attack, stroke, and intestinal ischemia.

[0551] The SNPs on Chromosome XIII at positions 42,536,771, 42,554,443, 42,554,646, and 42,554,817 have also been shown to be associated with DNAJD1 mRNA levels. The Chromosome XIII SNPs associated with lower DNAJD1 mRNA expression levels are 42,536,771T, 42,554,443A, 42,554,646A, and 42,554,817T, whereas that associated with higher mRNA expression levels are 42,536,771C, 42,554,443C, 42,554,646G, and 42,554,817C. In addition to those mentioned above, these SNPs may be utilized in the applications described above.

GOLPH4

[0552] As indicated in Tables 17, 18, 58 and 59, the expression level of the GOLPH4 gene in human cells is an inheritable “quantitative trait” with genetic determinants. Furthermore, the SNPs in accordance with the present invention are associated with the “quantitative trait”, i.e., GOLPH4 mRNA levels in human cells. Specifically, the SNPs EX12@−78C, EX15@−85C, EX15@+86C, EX16@323G, EX16@737A, EX16@771G are associated with a “low expression phenotype” while the EX12@−78T, EX51-85G, EX15@+86G, EX16@323A, EX16@737G, EX16@771A are associated with a “high expression phenotype.” Thus, the SNPs are particularly useful in predicting the level of GOLPH4 gene expression in an individual.

[0553] Thus, in one aspect, the present invention encompasses a method for predicting or detecting an individual's susceptibility to bacterial toxins, which comprises the step of genotyping the individual to determine the individual's genotype at one or more of the GOLPH4 loci identified in the present invention, namely, EX12@−78, EX15@−85, EX15@+86, EX16@323, EX16@737, EX16@771, or another locus at which the genotype is in linkage disequilibrium with one of these SNPs. Thus, if one or more EX12@−78T, EX15@−85G, EX15@+86G, EX16@323A, EX16@737G, EX16@771A, or a SNP that is in linkage disequilibrium with any one of such SNPs, is detected in the individual, then it can be reasonably predicted that the individual is at an increased risk of developing an adverse condition caused by bacterial toxins, particularly the ricin, cholera or Shiga toxins.

[0554] In particular, if an individual is homozygous with the GOLPH4 genotype EX 12@−78T/T, EX15@−85G/G, EX15@+86G/G, EX16@323A/A, EX16@737G/G, EX16@771A/A, or heterozygous with the GOLPH4 genotype EX12@−78C/T, EX15@−85C/G, EX15@+86C/G, EX16@323G/A, EX16@737A/G or EX16@771G/A, then it can be reasonably predicted that the individual has an elevated susceptibility to bacterial toxins. In other words, such an individual has an increased likelihood or is at an increased risk of developing an adverse condition caused by bacterial toxins, particularly ricin, cholera or Shiga toxins. If an individual is homozygous with the GOLPH4 genotype EX12@−78C/C, EX15@−85C/C, EX15@+86C/C, EX16@323G/G, EX16@737A/A or EX16@771G/G, then it can be reasonably predicted that the individual has a reduced susceptibility to bacterial toxins, particularly ricin, cholera or Shiga toxins.

[0555] In another aspect, the present invention provides a method for identifying high-risk patients who have a poor prognosis of adverse conditions caused by bacterial toxins, or for the prognosis of a condition associated with bacterial toxins, or predicting/determining the invasiveness of bacterial toxins in a patient, particularly a patient with an adverse condition caused by ricin, cholera, or Shiga toxin. The individual to be tested can be a healthy person or an individual diagnosed with a condition caused by a bacterial toxin. The method comprises the step of genotyping the individual to determine the individual's genotype at one or more of the GOLPH4 loci identified in the present invention, namely EX12@−78, EX15@−85, EX15@+86, EX16@323, EX16@737, EX16@771, or another locus at which the genotype is in linkage disequilibrium with one of these SNPs. Thus, if one or more the SNPs EX12@−78T, EX15@−85G, EX15@+86G, EX16@323A, EX16@737G, EX16@771A are detected, or a SNP that is in linkage disequilibrium with any one of such SNPs is detected in the individual, then it can be reasonably predicted that the individual has high invasive potential and that the condition caused by bacterial toxins has poor prognosis. If the individual is homozygous with the GOLPH4 genotype EX12@−78T/T, EX15@−85G/G, EX15@+86G/G, EX16@323A/A, EX16@737G/G, EX16@771A/A, it can be reasonably predicted that the individual will have a particularly poor prognosis for bacterial infection. On the other hand, if the individual is homozygous with the GOLPH4 genotype EX12@−78C/C, EX15@−85C/C, EX15@+86C/C, EX16@323G/G, EX16@737A/A, EX16@771G/G, it can be reasonably predicted that the individual has an good prognosis for bacterial infection, especially those associated with ricin, cholera, or Shiga toxin expression.

[0556] The SNPs listed in Table 18, i.e. those at positions 169,127,554, 169,140,725, 168,943,494 and 169,109,449 of chromosome III, have also been shown to be associated with GOLPH4 mRNA levels. Chromosome SNPs associated with lower GOLPH4 mRNA expression levels are, whereas those associated with lower GOLPH4 mRNA expression are. In addition to those mentioned above, these SNPs may be utilized in the applications described above.

RABEP1

[0557] As indicated in Tables 19-23 and 60-65, the expression level of the RABEP1 gene in human cells is an inheritable “quantitative trait” with genetic determinants. Furthermore, the SNPs and/or haplotypes in accordance with the present invention are associated with the “quantitative trait”, i.e., the RABEP1 mRNA level in human cells. Specifically, the SNPs EX1@−551C, EX1@73T, EX18@276T, EX14@30T, EX18@1782A, EX18@646m, EX18@690w, EX16@−42A, EX17@15A, EX17@36T, EX17@87G, EX18@903w, EX18@1621G, EX18@1676A, EX18@1689w, EX@1806C, EX18@2363A, EX18@2373w, EX18@2397G, EX18@2586T and EX18@2631G are associated with a “low expression phenotype” while the EX1@−551T, EX1@73C, EX18@276C, EX14@30C, EX18@1782T, EX18@646w, EX18@690m, EX16@−42T, EX17@15G, EX17@36C, EX17@87A, EX18@903m, EX18@1621A, EX18@1676G, EX18@1689m, EX@1806T, EX18@2363G, EX18@2373m, EX18@2397C, EX18@2586C and EX18@2631A are associated with a “high expression phenotype.” Thus, the SNPs and/or haplotypes are particularly useful in predicting the level of RABEP1 gene expression in an individual.

[0558] Thus, in one aspect, the present invention encompasses a method for predicting or detecting cancer susceptibility in an individual, which comprises the step of genotyping the individual to determine the individual's genotype at one or more of the RABEP1 loci identified in the present invention, namely EX1@−551, EX1@73, EX18@276, EX14@30, EX18@1782, EX18@646, EX18@690, EX16@−42, EX17@15, EX17@36, EX17@87, EX18@903, EX18@1621, EX18@1676, EX18@1689, EX@1806, EX18@2363, EX18@2373, EX18@2397, EX18@2586T and EX18@2631, or another locus at which the genotype is in linkage disequilibrium with one of the SNPs or haplotypes of the present invention. Thus, if one or more the SNPs EX1@−551T, EX1@73C, EX18@276C, EX14@30C, EX18@1782T, EX18@646w, EX18@690m, EX16@−42T, EX17@15G, EX17@36C, EX17@87A, EX18@903m, EX18@1621A, EX18@1676G, EX18@1689m, EX@1806T, EX18@2363G, EX18@2373m, EX18@2397C, EX18@2586C and EX18@2631A are detected, or a SNP that is in linkage disequilibrium with any one of such SNPs is detected in the individual, then it can be reasonably predicted that the individual is at an increased risk of developing cancer. In particularly, if an individual is homozygous with the RABEP1 genotype EX1@−551T/T, EX1@73C/C, EX18@276C/C, EX14@30C/C, EX18@1782T/T, EX18@646w/w, EX18@690m/m, EX16@−42T/T, EX17@15G/G, EX17@36C/C, EX17@87A/A, EX18@903m/m, EX18@1621A/A, EX18@1676G/G, EX18@1689m/m, EX@1806T/T, EX18@2363G/G, EX18@2373m/m, EX18@2397C/C, EX18@2586C/C and EX18@2631A/A, then it can be reasonably predicted that the individual has an elevated susceptibility to cancer. Likewise, if the individual is homozygous with a genotype at a locus that is in the same haplotype with the RABEP1 SNPs EX14@30T, EX18@1782A (in linkage disequilibrium), or in the same haplotype (linkage disequilibrium) with the RABEP1 SNPs EX16@−42A, EX17@15A, EX17@36T, EX17@87G, EX18@903w, EX18@1621G, EX18@1676A, EX18@1689w, EX@1806C, EX18@2363A, EX18@2373w, EX18@2397G, EX18@2586T and EX18@2631G, or in the same haplotype (linkage disequilibrium) with the SNPs EX18@646m, EX18@690w, then it can reasonably be predicted that the individual has an elevated susceptibility to cancer. In other words, such an individual has an increased likelihood or is at an increased risk of developing cancer. If an individual is heterozygous, then his or her risk of developing cancer is at an intermediate level. On the other hand, if the individual is homozygous with the RABEP1 genotype EX1@−551C/C, EX1@73T/T, EX18@276T/T, EX14@30T/T, EX18@1782A/A, EX18@646m/m, EX18@690w/w, EX16@−42A/A, EX17@15A/A, EX17@36T/T, EX17@87G/G, EX18@903w/w, EX18@1621G/G, EX18@1676A/A, EX18@1689w/w, EX@1806C/C, EX18@2363A/A, EX18@2373w/w, EX18@2397G/G, EX18@2586T/T and EX18@2631G/G, then it can be reasonably predicted that the individual has a reduced susceptibility to cancer. Similarly, if the individual is homozygous with a genotype at a locus that is in the same haplotype with the SNPs EX14@30C, EX18@1782T (in linkage disequilibrium), or in the same haplotype (linkage disequilibrium) with the SNPs EX16@−42T, EX17@15G, EX17@36c, EX17@87A, EX18@903m, EX18@1621A, EX18@1676G, EX18@1689m, EX@1806T, EX18@2363G, EX18@2373m, EX18@2397C, EX18@2586C and EX18@2631A or in the same haplotype (linkage disequilibrium) with the SNPs EX18@646w, EX18@690m, then it can reasonably be predicted that the individual has a reduced susceptibility to cancer.

[0559] In another aspect, the present invention provides a method for identifying high-risk patients who have a poor prognosis of cancer, or for the prognosis of cancer, or predicting/determining the invasiveness and metastatic potential of a tumor in a patient. The individual to be tested can be a healthy person or an individual diagnosed of cancer. The method comprises the step of genotyping the individual to determine the individual's genotype at one or more of the loci identified in the present invention, namely RABEP1 SNPs EX1@−551, EX1@73, EX18@276, EX14@30, EX18@1782, EX18@646, EX18@690, EX16@−42, EX17@15, EX17@36, EX17@87, EX18@903, EX18@1621, EX18@1676, EX18@1689, EX@1806, EX18@2363, EX18@2373, EX18@2397, EX18@2586T and EX18@2631, or another locus at which the genotype is in linkage disequilibrium with one of these SNPs. Thus, if one or more the RABEP1 SNPs EX1@−551T, EX1@73C, EX18@276C, EX14@30C, EX18@1782T, EX18@646w, EX18@690m, EX16@−42T, EX17@15G, EX17@36C, EX17@87A, EX18@903m, EX18@1621A, EX18@1676G, EX18@1689m, EX@1806T, EX18@2363G, EX18@2373m, EX18@2397C, EX18@2586C and EX18@2631A are detected, or a SNP that is in linkage disequilibrium with any one of such SNPs is detected in the individual, then it can be reasonably predicted that the tumor in such an individual has high metastatic potential, that the cancer has poor prognosis, and that the tumor cells are likely invasive. In other words, the individual has an increased likelihood, or is at an increased risk for cancer metastasis. Particularly, if an individual is homozygous with the RABEP1 genotype EX1@−551T/T, EX1@73C/C, EX18@276C/C, EX14@30C/C, EX18@1782T/T, EX18@646w/w, EX18@690m/m, EX16@−42T/T, EX17@15G/G, EX17@36C/C, EX17@87A/A, EX18@903m/m, EX18@1621A/A, EX18@1676G/G, EX18@1689m/m, EX@1806T/T, EX18@2363G/G, EX18@2373m/m, EX18@2397C/C, EX18@2586C/C and EX18@2631A/A, then the individual has particularly poor prognosis, and cells of their tumor are likely highly invasive. In other words, the individual has a substantially increased likelihood, or is at a substantially increased risk for cancer metastasis. However, if an individual is heterozygous with the RABEP1 genotype EX1@−551C/T, EX1@73T/C, EX18@276T/C, EX14@30T/C, EX18@1782A/T, EX18@646m/w, EX18@690w/m, EX16@−42A/T, EX17@15A/G, EX17@36T/C, EX17@87G/A, EX18@903w/m, EX18@1621G/A, EX18@1676A/G, EX18@1689w/m, EX@1806C/T, EX18@2363A/G, EX18@2373w/m, EX18@2397G/C, EX18@2586T/C and EX18@2631G/A, then the individual has an intermediate prognosis, and the cells of their tumor are potentially invasive. Specifically, the individual has an intermediate level of risk for cancer metastasis. That is, the risk is higher than a person having a homozygous RABEP1 genotype of EX1@−551C/C, EX1@73T/T, EX18@276T/T, EX14@30T/T, EX18@1782A/A, EX18@646m/m, EX18@690w/w, EX16@−42A/A, EX7@15A/A, EX17@36T/T, EX17@87G/G, EX18@903w/w, EX18@1621G/G, EX18@1676A/A, EX18@1689w/w, EX18@1806C/C, EX18@2363A/A, EX18@2373w/w, EX18@2397G/G, EX18@2586T/T and EX18@2631G/G, but is lower than a person having a homozygous RABEP1 genotype of EX1@−551T/T, EX1@73C/C, EX18@276C/C, EX14@30C/C, EX18@1782T/T, EX18@646w/w, EX18@690m/m, EX16@−42T/T, EX17@15G/G, EX17@36C/C, EX17@87A/A, EX18@903m/m, EX18@1621A/A, EX18@1676G/G, EX18@1689m/m, EX18@1806T/T, EX18@2363G/G, EX18@2373m/m, EX18@2397C/C, EX18@2586C/C and EX18@2631A/A.

[0560] Further, if the individual is homozygous with the RABEP1 genotype EX1@−551C/C, EX1@73T/T, EX18@276T/T, EX14@30T/T, EX18@1782A/A, EX18@646m/m, EX18@690w/w, EX16@−42A/A, EX17@15A/A, EX17@36T/T, EX17@87G/G, EX18@903w/w, EX18@1621G/G, EX18@1676A/A, EX18@1689w/w, EX18@1806C/C, EX18@2363A/A, EX18@2373w/w, EX18@2397G/G, EX18@2586T/T and EX18@2631G/G, then it can be reasonably predicted that the tumor in the individual has low metastatic potential, that patient with the cancer has a good prognosis, and that the tumor cells are likely not invasive. That is, the individual does not have an increased likelihood, or increased risk, for cancer metastasis.

[0561] Another aspect of the present invention encompasses a method for predicting or detecting susceptibility to neurodegenerative disease in a patient, which comprises the step of genotyping the individual to determine the individual's genotype at one or more of the RABEP1 loci identified in the present invention, namely EX1@−551, EX1@73, EX18@276, EX14@30, EX18@1782, EX18@646, EX18@690, EX16@−42, EX17@15, EX17@36, EX17@87, EX18@903, EX18@1621, EX18@1676, EX18@1689, EX@1806, EX18@2363, EX18@2373, EX18@2397, EX18@2586T and EX18@2631, or another locus at which the genotype is in linkage disequilibrium with one of the SNPs of the present invention. Thus, if one or more the RABEP1 SNPs EX1@−551 T, EX1@73C, EX18@276C, EX14@30C, EX18@1782T, EX18@646w, EX18@690m, EX16@−42T, EX17@15G, EX17@36C, EX17@87A, EX18@903m, EX18@1621A, EX18@1676G, EX18@1689m, EX@1806T, EX18@2363G, EX18@2373m, EX18@2397C, EX18@2586C and EX18@2631A are detected, or a SNP that is in linkage disequilibrium with any one of such SNPs is detected in the individual, then it can be reasonably predicted that the individual has increased risk of neurodegenerative disease, especially Parkinson's disease, Alzheimer's disease, Niemann-Pick type C disease and age-related neurodegeneration. In particular, if an individual is homozygous with the genotype EX1@−551T/T, EX1@73C/C, EX18@276C/C, EX14@30C/C, EX18@1782T/T, EX18@646w/w, EX18@690m/m, EX16@−42T/T, EX17@15G/G, EX17@36C/C, EX17@87A/A, EX18@903m/m, EX18@1621A/A, EX18@1676G/G, EX18@1689m/m, EX18@1806T/T, EX18@2363G/G, EX18@2373m/m, EX18@2397C/C, EX18@2586C/C and EX18@2631A/A, then it can be reasonably predicted that the individual has an elevated susceptibility to neurodegenerative disease. In other words, such an individual has an increased likelihood or is at an increased risk of developing a neurodegenerative disease. If an individual is heterozygous, then his or her risk of developing Parkinson's disease, Alzheimer's disease, Niemann-Pick type C disease and age-related neurodegeneration, is at an intermediate level. On the other hand, if the individual is homozygous with the genotype SNPs EX1@−551C/C, EX1@73T/T, EX18@276T/T, EX14@30T/T, EX18@1782A/A, EX18@646m/m, EX18@690w/w, EX16@−42A/A, EX17@15A/A, EX17@36T/T, EX17@87G/G, EX18@903w/w, EX18@1621G/G, EX18@1676A/A, EX18@1689w/w, EX18@1806C/C, EX18@2363A/A, EX18@2373w/w, EX18@2397G/G, EX18@2586T/T and EX18@2631G/G, then it can be reasonably predicted that the individual has a reduced susceptibility to neurodegenerative disease, especially Parkinson's disease, Alzheimer's disease, Niemann-Pick type C disease and age-related neurodegeneration.

[0562] In another aspect, the present invention provides a method for identifying high-risk patients who have a poor prognosis of a neurodegenerative or neurological disease, or for the prognosis of neurodegenerative or neurological disease, or predicting/determining the ability to recover from neuronal damage resulting from brain trauma. The individual to be tested can be a healthy person or an individual diagnosed with or neurodegenerative disease. Thus, if one or more of the SNPs EX1@−551T, EX1@73C, EX18@276C, EX14@30C, EX18@1782T, EX18@646w, EX18@690m, EX16@−42T, EX17@15G, EX17@36C, EX17@87A, EX18@903m, EX18@1621A, EX18@1676G, EX18@1689m, EX@1806T, EX18@2363G, EX18@2373m, EX18@2397C, EX18@2586C and EX18@2631A are detected, or a SNP that is in linkage disequilibrium with any one of such SNPs is detected in the individual, then it can be reasonably predicted that the individual has an increased likelihood of neurodegenerative disease, especially Parkinson's disease, Alzheimer's disease, Niemann-Pick type C disease and age-related neurodegeneration. Particularly, if an individual is homozygous with the genotype EX1@−551T/T, EX1@73C/C, EX18@276C/C, EX14@30C/C, EX18@1782T/T, EX18@646w/w, EX18@690m/m, EX16@−42T/T, EX17@15G/G, EX17@36C/C, EX17@87A/A, EX18@903m/m, EX18@1621A/A, EX18@1676G/G, EX18@1689m/m, EX18@1806T/T, EX18@2363G/G, EX18@2373m/m, EX18@2397C/C, EX18@2586C/C and EX18@2631A/A, then the individual has particular poor prognosis neurodegenerative disease or damage will have greater effects. In other words, the individual has a substantially increased likelihood or at a substantially increased risk of progression of the neurodegenerative disease or damage. However, if an individual is heterozygous with the genotype EX1@−551C/T, EX1@73T/C, EX18@276T/C, EX14@30T/C, EX18@1782A/T, EX18@646m/w, EX18@690w/m, EX16@−42A/T, EX17@15A/G, EX17@36T/C, EX17@87G/A, EX18@903w/m, EX18@1621G/A, EX18@1676A/G, EX18@1689w/m, EX@1806C/T, EX18@2363A/G, EX18@2373w/m, EX18@2397G/C, EX18@2586T/C and EX18@2631G/A, an intermediate level of risk of neurological disease, especially Parkinson's disease, Alzheimer's disease, Niemann-Pick type C disease and age-related neurodegeneration. That is, the risk is higher than a person having a homozygous genotype of EX1@−551C/C, EX1@73T/T, EX18@276T/T, EX14@30T/T, EX18@1782A/A, EX18@646m/m, EX1 8@690w/w, EX16@−42A/A, EX17@15A/A, EX17@36T/T, EX17@87G/G, EX18@903w/w, EX18@1621G/G, EX18@1676A/A, EX18@1689w/w, EX@1806C/C, EX18@2363A/A, EX18@2373w/w, EX18@2397G/G, EX18@2586T/T and EX18@2631G/G, but is lower than a person having a homozygous genotype of EX1@−551 T/T, EX1@73C/C, EX18@276C/C, EX14@30C/C, EX18@1782T/T, EX18@646w/w, EX18@690m/m, EX16@−42T/T, EX17@15G/G, EX17@36C/C, EX17@87A/A, EX18@903m/m, EX18@1621A/A, EX18@1676G/G, EX18@1689m/m, EX18@1806T/T, EX18@2363G/G, EX18@2373m/m, EX18@2397C/C, EX18@2586C/C and EX18@2631A/A.

[0563] The SNPs listed in Table 23, i.e. those at positions 5,238,870, 5,264,880, 5,265,310, 5,251,617, 5,250,885 and 5,255,563 of chromosome 17, have also been shown to be associated with RABEP1 mRNA levels. In addition to those mentioned above, these SNPs may be utilized in the applications described above.

TAP2

[0564] As indicated in Tables 24, 25 and 66-70 below, the expression level of the TAP2 gene in human cells is an inheritable “quantitative trait” with genetic determinants. Furthermore, the SNPs and/or haplotypes in accordance with the present invention are associated with the “quantitative trait”, i.e., mRNA level of the TAP2 gene in human cells. Specifically, the SNPs EX8@36C, EX10@+23T, EX12@19C, EX12@61A, EX12@127T, EX12@332A, EX12@356G, EX11@17A, EX11@+9C, EX12@159G, EX12@291G, EX12@358w, EX12@466A, EX12@586C, EX12@668T, EX12@754G, EX12@755C, EX12@793G, EX12@847C and EX12@1132w are associated with a “low expression phenotype” while the EX8@36T, EX10@+23C, EX12@19T, EX12@61G, EX12@127C, EX12@332G, EX12@356T, EX11@17G, EX11@+9T, EX12@159T, EX12@291A, EX12@358m, EX12@466G, EX12@586T, EX12@668C, EX12@754A, EX12@755T, EX12@793T, EX12@847T and EX12@1132m are associated with a “high expression phenotype.” Thus, the SNPs and/or haplotypes are particularly useful in predicting the level of TAP2 gene expression in an individual.

[0565] Thus, in one aspect, the present invention encompasses a method for predicting or detecting cancer susceptibility in an individual, which comprises the step of genotyping the individual to determine the individual's genotype at one or more of the TAP2 loci identified in the present invention, namely EX8@36, EX10@+23, EX12@19, EX12@61, EX12@127, EX12@332, EX12@356, EX11@17, EX1@1B+9, EX12@159G, EX12@291, EX12@358, EX12@466, EX12@586, EX12@668, EX12@754, EX12@755, EX12@793, EX12@847 or EX12@1132, or another locus at which the genotype is in linkage disequilibrium with one of the SNPs or haplotypes of the present invention. Thus, if one or more the EX8@36C, EX10@+23T, EX12@19C, EX12@61A, EX12@127T, EX12@332A, EX12@356G, EX11@17A, EX11@+9C, EX12@159G, EX12@291G, EX12@358w, EX12@466A, EX12@586C, EX12@668T, EX12@754G, EX12@755C, EX12@793G, EX12@847C or EX12@1132w are detected, or a SNP that is in linkage disequilibrium with any one of such SNPs is detected in the individual, then it can be reasonably predicted that the individual is at an increased risk of developing cancer, particularly skin cancer, breast cancer or small cell lung cancer. In particularly, if an individual is homozygous with the TAP2 genotype EX8@36C/C, EX10@+23T/T, EX12@19C/C, EX12@61A/A, EX12@127T/T, EX12@332A/A, EX12@356G/G, EX11@17A/A, EX11@+9C/C, EX12@159G/G, EX12@291G/G, EX12@358w/w, EX12@466A/A, EX12@586C/C, EX12@668T/T, EX12@754G/G, EX12@755C/C, EX12@793G/G, EX12@847C/C or EX12@1132w/w, then it can be reasonably predicted that the individual has an elevated susceptibility to cancer, particularly skin cancer, breast cancer or small cell lung cancer. Likewise, if the individual is homozygous with a genotype at a TAP2 locus that is in the same haplotype with the SNPs EX12@61A, EX12@127T, EX12@332A, EX12@356G, EX11@17A, EX11@+9C, EX12@159G, EX12@291G, EX12@358w, EX12@466A, EX12@586C, EX12@668T, EX12@754G, EX12@755C, EX12@793G, EX12@847C or EX12@1132w (in linkage disequilibrium), then it can reasonably be predicted that the individual has an elevated susceptibility to cancer, particularly skin cancer, breast cancer or small cell lung cancer. In other words, such an individual has an increased likelihood or is at an increased risk of developing cancer, particularly skin cancer, breast cancer or small cell lung cancer. If an individual is heterozygous, then his or her risk of developing cancer is at an intermediate level. On the other hand, if the individual is homozygous with the TAP2 genotype EX8@36T/T, EX10@+23C/C, EX12@19T/T, EX12@61G/G, EX12@127C/C, EX12@332G/G, EX12@356T/T, EX11@17G/G, EX1 1@+9T/T, EX12@159T/T, EX12@291A/A, EX12@358m/m, EX12@466G/G, EX12@586T/T, EX12@668C/C, EX12@754A/A, EX12@755T/T, EX12@793T/T, EX12@847T/T or EX12@1132m/m, then it can be reasonably predicted that the individual has a reduced susceptibility to cancer, particularly skin cancer, breast cancer or small cell lung cancer. Similarly, if the individual is homozygous with a genotype at a TAP2 locus that is in the same haplotype with the SNPs EX12@61G, EX12@127C, EX12@332G, EX12@356T, EX11@17G, EX11@+9T, EX12@159T, EX12@291A, EX12@358m, EX12@466G, EX12@586T, EX12@668C, EX12@754A, EX12@755T, EX12@793T, EX12@847T and EX12@1132m (in linkage disequilibrium), then it can reasonably be predicted that the individual has a reduced susceptibility to cancer, particularly skin cancer, breast cancer or small cell lung cancer.

[0566] In another aspect, the present invention provides a method for identifying patients who's cancer has a poor prognosis, or for predicting or determining the potential invasiveness and metastatic potential of tumor in a patient, particularly cancer patient, e.g., with cancer such as melanoma, breast cancer or small cell lung cancer. The patient to be tested can be a patient diagnosed with cancer, particularly melanoma, breast cancer or small cell lung cancer. The method comprises the steps of genotyping the cancerous growth, or tumor, to determine the genotype of the cancer itself, by determining the nucleotide present at one or more of the TAP2 loci identified in the present invention, namely EX8@36, EX10@+23, EX12@19, EX12@61, EX12@127, EX12@332, EX12@356, EX11@17, EX11@+9, EX12@159G, EX12@291, EX12@358, EX12@466, EX12@586, EX12@668, EX12@754, EX12@755, EX12@793, EX12@847 or EX12@1132, or another locus at which the genotype is in linkage disequilibrium with one of the SNPs or haplotypes of the present invention. Thus, if one or more the TAP2 SNPs EX8@36C, EX10@+23T, EX12@19C, EX12@61A, EX12@127T, EX12@332A, EX12@356G, EX11@17A, EX11@+9C, EX12@159G, EX12@291G, EX12@358w, EX12@466A, EX12@586C, EX12@668T, EX12@754G, EX12@755C, EX12@793G, EX12@847C or EX12@1132w are detected, or a SNP that is in linkage disequilibrium with any one of such SNPs is detected in the cancerous growth or tumor, then it can be reasonably predicted that the cancerous growth or tumor has high metastatic potential, that the cancer has poor prognosis, and that the cells of the cancerous growth or tumor are likely invasive. In other words, the patient with a cancerous growth or tumor with such a genotype has an increased likelihood, or increased risk, of metastatic cancer. Particularly, if the cancerous growth or tumor is homozygous with the TAP2 genotype EX8@36C/C, EX10@+23T/T, EX12@19C/C, EX12@61A/A, EX12@127T/T, EX12@332A/A, EX12@356G/G, EX11@17A/A, EX11@+9C/C, EX12@159G/G, EX12@291G/G, EX12@358w/w, EX12@466A/A, EX12@586C/C, EX12@668T/T, EX12@754G/G, EX12@755C/C, EX12@793G/G, EX12@847C/C or EX12@1132w/w, then the patient has particularly poor prognosis and their tumor cells are likely highly invasive capable of rapid growth. In other words, the individual has a substantially increased likelihood or at a substantially increased risk of cancer metastasis and rapid cancer growth. However, if the cancerous growth or tumor is heterozygous with the TAP2 genotype EX8@36C/T, EX10@+23T/C, EX12@19C/T, EX12@61A/G, EX12@127T/C, EX12@332A/G, EX12@356G/T, EX11@17A/G, EX11@+9C/T, EX12@159G/T, EX12@291G/A, EX12@358w/m, EX12@466A/G, EX12@586C/T, EX12@668T/C, EX12@754G/A, EX12@755C/T, EX12@793G/T, EX12@847C/T or EX12@1132w/m, then the patient has a somewhat less poor prognosis and their tumor cells are likely only moderately invasive. Specifically, the patient has an intermediate level of risk of cancer metastasis. That is, the risk is greater than a patient having a cancerous growth or tumor that has a homozygous TAP2 genotype of EX8@36C/C, EX10@+23T/T, EX12@19C/C, EX12@61A/A, EX12@127T/T, EX12@332A/A, EX12@356G/G, EX11@17A/A, EX11@+9C/C, EX12@159G/G, EX12@291G/G, EX12@358w/w, EX12@466A/A, EX12@586C/C, EX12@668T/T, EX12@754G/G, EX12@755C/C, EX12@793G/G, EX12@847C/C or EX12@1132w/w, but is lower than a patient having a cancerous growth or tumor that has a homozygous TAP2 genotype of EX8@36T/T, EX10@+23C/C, EX12@19T/T, EX12@61G/G, EX12@127C/C, EX12@332G/G, EX12@356T/T, EX11@17G/G, EX11@+9T/T, EX12@159T/T, EX12@291A/A, EX12@358m/m, EX12@466G/G, EX12@586T/T, EX12@668C/C, EX12@754A/A, EX12@755T/T, EX12@793T/T, EX12@847T/T or EX12@1132m/m.

[0567] Thus, if the patient has a cancerous growth or tumor that has a homozygous TAP2 genotype of EX8@36T/T, EX10@+23C/C, EX12@19T/T, EX12@61G/G, EX12@127C/C, EX12@332G/G, EX12@356T/T, EX11@17G/G, EX11@+9T/T, EX12@159T/T, EX12@291A/A, EX12@358m/m, EX12@466G/G, EX12@586T/T, EX12@668C/C, EX12@754A/A, EX12@755T/T, EX12@793T/T, EX12@847T/T or EX12@1132m/m, then it can be reasonably predicted that the tumor in the individual has low metastic potential, that the cancer has a better prognosis, and that the tumor cells are likely less invasive and give to rapid growth. That is, the patient does not have an increased likelihood or increased risk of cancer metastasis. Similarly, if the cancerous growth or tumor is homozygous with a genotype at a TAP2 locus that is in the same haplotype with the SNPs EX12@61G/G, EX12@127C/C, EX12@332G/G, EX12@356T/T, EX11@17G/G, EX11@+9T/T, EX12@159T/T, EX12@291A/A, EX12@358m/m, EX12@466G/G, EX12@586T/T, EX12@668C/C, EX12@754A/A, EX12@755T/T, EX12@793T/T, EX12@847T/T or EX12@1132m/m (in linkage disequilibrium), then it can reasonably be predicted that the cancer has a low metastatic potential, has good prognosis, and the tumor cells are likely less invasive. In other words, the patient does not have an increased likelihood or increased risk of cancer metastasis.

[0568] In another aspect, the present invention encompasses a method for predicting or detecting susceptibility to autoimmune disease in an individual, which comprises the step of genotyping the individual to determine the individual's genotype at one or more of the TAP2 loci identified in the present invention, namely EX8@36, EX10@+23, EX12@19, EX12@61, EX12@127, EX12@332, EX12@356, EX11@17, EX11@+9, EX12@159G, EX12@291, EX12@358, EX12@466, EX12@586, EX12@668, EX12@754, EX12@755, EX12@793, EX12@847 or EX12@1132, or another locus at which the genotype is in linkage disequilibrium with one of the SNPs or haplotypes of the present invention. Thus, if one or more the TAP2 SNPs EX8@36C, EX10@+23T, EX12@19C, EX12@61A, EX12@127T, EX12@332A, EX12@356G, EX11@17A, EX1@+9C, EX12@159G, EX12@291G, EX12@358w, EX12@466A, EX12@586C, EX12@668T, EX12@754G, EX12@755C, EX12@793G, EX12@847C or EX12@1132w are detected, or a SNP that is in linkage disequilibrium with any one of such SNPs is detected in the individual, then it can be reasonably predicted that the individual is at an increased risk of developing an autoimmune disease, particularly Wegener's granulomatosis, multiple sclerosis, type 1 diabetes mellitus, lupus, and rheumatoid arthritis. In particularly, if an individual is homozygous with the TAP2 genotype EX8@36C/C, EX10@+23T/T, EX12@19C/C, EX12@61A/A, EX12@127T/T, EX12@332A/A, EX12@356G/G, EX11@17A/A, EX11@+9C/C, EX12@159G/G, EX12@291G/G, EX12@358w/w, EX12@466A/A, EX12@586C/C, EX12@668T/T, EX12@754G/G, EX12@755C/C, EX12@793G/G, EX12@847C/C or EX12@1132w/w, then it can be reasonably predicted that the individual has an elevated susceptibility to autoimmune disease, particularly Wegener's granulomatosis, multiple sclerosis, type 1 diabetes mellitus, lupus, and rheumatoid arthritis. Likewise, if the individual is homozygous with a TAP2 genotype at a locus that is in the same haplotype with the SNPs EX12@61A, EX12@127T, EX12@332A, EX12@356G, EX11@17A, EX11@+9C, EX12@159G, EX12@291G, EX12@358w, EX12@466A, EX12@586C, EX12@668T, EX12@754G, EX12@755C, EX12@793G, EX12@847C or EX12@1132w (in linkage disequilibrium), then it can reasonably be predicted that the individual has an elevated susceptibility to autoimmune disease, particularly Wegener's granulomatosis, multiple sclerosis, type 1 diabetes mellitus, lupus, and rheumatoid arthritis. In other words, such an individual has an increased likelihood or is at an increased risk of developing autoimmune disease, particularly Wegener's granulomatosis, multiple sclerosis, type 1 diabetes mellitus, lupus, and rheumatoid arthritis. If an individual is heterozygous, then his or her risk of developing autoimmune disease is at an intermediate level. One the other hand, if the individual is homozygous with the TAP2 genotype EX8@36T/T, EX10@+23C/C, EX12@19T/T, EX12@61G/G, EX12@127C/C, EX12@332G/G, EX12@356T/T, EX11@17G/G, EX11@+9T/T, EX12@159T/T, EX12@291A/A, EX12@358m/m, EX12@466G/G, EX12@586T/T, EX12@668C/C, EX12@754A/A, EX12@755T/T, EX12@793T/T, EX12@847T/T or EX12@1132m/m, then it can be reasonably predicted that the individual has a reduced susceptibility to autoimmune disease, particularly Wegener's granulomatosis, multiple sclerosis, type 1 diabetes mellitus, lupus, and rheumatoid arthritis. Similarly, if the individual is homozygous with a genotype at a locus that is in the same haplotype with the TAP2 SNPs EX12@61G, EX12@127C, EX12@332G, EX12@356T, EX11@17G, EX11@+9T, EX12@159T, EX12@291A, EX12@358m, EX12@466G, EX12@586T, EX12@668C, EX12@754A, EX12@755T, EX12@793T, EX12@847T and EX12@1132m (in linkage disequilibrium), then it can reasonably be predicted that the individual has a reduced susceptibility to autoimmune disease, particularly Wegener's granulomatosis, multiple sclerosis, type 1 diabetes, lupus, mellitus and rheumatoid arthritis.

[0569] In yet another aspect, the present invention encompasses a method for predicting or detecting susceptibility to viral infection in an individual, which comprises the step of genotyping the individual to determine the individual's genotype at one or more of the TAP2 loci identified in the present invention, namely EX8@36, EX10@+23, EX12@19, EX12@61, EX12@127, EX12@332, EX12@356, EX11@17, EX11@+9, EX12@159G, EX12@291, EX12@358, EX12@466, EX12@586, EX12@668, EX12@754, EX12@755, EX12@793, EX12@847 or EX12@1132, or another locus at which the genotype is in linkage disequilibrium with one of the SNPs or haplotypes of the present invention. Thus, if one or more the TAP2 SNPs EX8@36C, EX10@+23T, EX12@19C, EX12@61A, EX12@127T, EX12@332A, EX12@356G, EX11@17A, EX11@+9C, EX12@159G, EX12@291G, EX12@358w, EX12@466A, EX12@586C, EX12@668T, EX12@754G, EX12@755C, EX12@793G, EX12@847C or EX12@1132w are detected, or a SNP that is in linkage disequilibrium with any one of such SNPs is detected in the individual, then it can be reasonably predicted that the individual is at an increased risk of developing viral infection. In particularly, if an individual is homozygous with the TAP2 genotype EX8@36C/C, EX10@+23T/T, EX12@19C/C, EX12@61A/A, EX12@127T/T, EX12@332A/A, EX12@3356G/G, EX11@17A/A, EX11@+9C/C, EX12@159G/G, EX12@291G/G, EX12@358w/w, EX12@466A/A, EX12@586C/C, EX12@668T/T, EX12@754G/G, EX12@755C/C, EX12@793G/G, EX12@847C/C or EX12@1132w/w, then it can be reasonably predicted that the individual has an elevated susceptibility to viral infection. Likewise, if the individual is homozygous with a genotype at a TAP2 locus that is in the same haplotype with the SNPs EX12@61A, EX12@127T, EX12@332A, EX12@356G, EX11@17A, EX11@+9C, EX12@159G, EX12@291G, EX12@358w, EX12@466A, EX12@586C, EX12@668T, EX12@754G, EX12@755C, EX12@793G, EX12@847C or EX12@1132w (in linkage disequilibrium), then it can reasonably be predicted that the individual has an elevated susceptibility to viral infection. In other words, such an individual has an increased likelihood or is at an increased risk of developing viral infection. If an individual is heterozygous, then his or her risk of developing viral infection is at an intermediate level. One the other hand, if the individual is homozygous with the TAP2 genotype EX8@36T/T, EX10@+23C/C, EX12@19T/T, EX12@61G/G, EX12@127C/C, EX12@332G/G, EX12@356T/T, EX11@17G/G, EX11@+9T/T, EX12@159T/T, EX12@291A/A, EX12@358m/m, EX12@466G/G, EX12@586T/T, EX12@668C/C, EX12@754A/A, EX12@755T/T, EX12@793T/T, EX12@847T/T or EX12@1132m/m, then it can be reasonably predicted that the individual has a reduced susceptibility to viral infection. Similarly, if the individual is homozygous with a genotype at a TAP2 locus that is in the same haplotype with the SNPs EX12@61G, EX12@127C, EX12@332G, EX12@356T, EX11@17G, EX11@+9T, EX12@159T, EX12@291A, EX12@358m, EX12@466G, EX12@586T, EX12@668C, EX12@754A, EX12@755T, EX12@793T, EX12@847T and EX12@1132m (in linkage disequilibrium), then it can reasonably be predicted that the individual has a reduced susceptibility to viral infection.

[0570] In still another aspect, the present invention provides a method for identifying high-risk patients who have a poor viral infection prognosis, or for the prognosis of viral infection, or predicting/determining the invasiveness and potential for viral replication in a patient. The individual to be tested can be a healthy person or an individual diagnosed with viral infection. The method comprises the step of genotyping the individual to determine the individual's genotype at one or more of the TAP2 loci identified in the present invention, namely EX8@36, EX10@+23, EX12@19, EX12@61, EX12@127, EX12@332, EX12@356, EX11@17, EX11@+9, EX12@159G, EX12@291, EX12@358, EX12@466, EX12@586, EX12@668, EX12@754, EX12@755, EX12@793, EX12@847 or EX12@1132, or another locus at which the genotype is in linkage disequilibrium with one of the SNPs or haplotypes of the present invention. Thus, if one or more the TAP2 SNPs EX8@36C, EX10@+23T, EX12@19C, EX12@61A, EX12@127T, EX12@332A, EX12@356G, EX11@17A, EX11@+9C, EX12@159G, EX12@291G, EX12@358w, EX12@466A, EX12@586C, EX12@668T, EX12@754G, EX12@755C, EX12@793G, EX12@847C or EX12@1132w are detected, or a SNP that is in linkage disequilibrium with any one of such SNPs is detected in the individual, then it can be reasonably predicted that the individual has an increase likelihood or increased potential of viral replication. Particularly, if an individual is homozygous with the TAP2 genotype EX8@36C/C, EX1O@+23T/T, EX12@19C/C, EX12@61A/A, EX12@127T/T, EX12@332A/A, EX12@356G/G, EX11@17A/A, EX11@+9C/C, EX12@159G/G, EX12@291G/G, EX12@358w/w, EX12@466A/A, EX12@586C/C, EX12@668T/T, EX12@754G/G, EX12@755C/C, EX12@793G/G, EX12@847C/C or EX12@1132w/w, then the individual has particularly poor viral infection prognosis. In other words, the individual has a substantially increased likelihood or at a substantially increased risk of viral replication. However, if an individual is heterozygous with the TAP2 genotype EX8@36C/T, EX1O@+23T/C, EX12@19C/T, EX12@61A/G, EX12@127T/C, EX12@332A/G, EX12@356G/T, EX11@17A/G, EX11@+9C/T, EX12@159G/T, EX12@291G/A, EX12@358w/m, EX12@466A/G, EX12@586C/T, EX12@668T/C, EX12@754G/A, EX12@755C/T, EX12@793G/T, EX12@847C/T or EX12@1132w/m, then the individual has poor prognosis. Specifically, the individual has an intermediate level of risk of progression of viral infection and/or viral replication. That is, the risk is greater than a person having a homozygous TAP2 genotype of EX8@36C/C, EX10@+23T/T, EX12@19C/C, EX12@61A/A, EX12@127T/T, EX12@332A/A, EX12@356G/G, EX11@17A/A, EX11@+9C/C, EX12@159G/G, EX12@291G/G, EX12@358w/w, EX12@466A/A, EX12@586C/C, EX12@668T/T, EX12@754G/G, EX12@755C/C, EX12@793G/G, EX12@847C/C or EX12@1132w/w, but is lower than a person having a homozygous TAP2 genotype of EX8@36T/T, EX10@+23C/C, EX12@19T/T, EX12@61G/G, EX12@127C/C, EX12@332G/G, EX12@356T/T, EX11@17G/G, EX1 1@+9T/T, EX12@159T/T, EX12@291A/A, EX12@358m/m, EX12@466G/G, EX12@586T/T, EX12@668C/C, EX12@754A/A, EX12@755T/T, EX12@793T/T, EX12@847T/T or EX12@1132m/m.

[0571] Thus, if the individual is homozygous with the TAP2 genotype EX8@36T/T, EX10@+23C/C, EX12@19T/T, EX12@61G/G, EX12@127C/C, EX12@332G/G, EX12@356T/T, EX11@17G/G, EX11@+9T/T, EX12@159T/T, EX12@291A/A, EX12@358m/m, EX12@466G/G, EX12@586T/T, EX12@668C/C, EX12@754A/A, EX12@755T/T, EX12@793T/T, EX12@847T/T or EX12@1132m/m, then it can be reasonably predicted that the viral infection in the individual has low replication potential, that the individual has a good prognosis. That is, the individual does not have an increased likelihood or increased risk of viral replication and/or viral infection progression. Similarly, if the individual is homozygous with a genotype at a TAP2 locus that is in the same haplotype with the SNPs EX12@61G/G, EX12@127C/C, EX12@332G/G, EX12@356T/T, EX11@17G/G, EX11@+9T/T, EX12@159T/T, EX12@291A/A, EX12@358m/m, EX12@466G/G, EX12@586T/T, EX12@668C/C, EX12@754A/A, EX12@755T/T, EX12@793T/T, EX12@847T/T or EX12@1132m/m (in linkage disequilibrium), then it can reasonably be predicted that the individual has a low replication potential, that the individual has a good prognosis. In other words, the individual does not have an increased likelihood or increased risk of viral infection progression.

[0572] The SNPs listed in Table 25, i.e. those at positions 32,511,862 and 32,512,605 of chromosome 6, have also been shown to be associated with TAP2 mRNA levels. Chromosome 6 SNPs associated with lower TAP2 mRNA expression levels are 32,511,862T and 32,512,605A, whereas those associated with lower TAP2 mRNA expression are 32,511,862C and 32,512,605C. In addition to those mentioned above, these SNPs may be utilized in the applications described above.

NARG2

[0573] As indicated in Tables 26, 71 and 72, the expression level of the NARG2 gene in human cells is an inheritable “quantitative trait” with genetic determinants. Furthermore, the SNPs in accordance with the present invention are associated with the “quantitative trait”, i.e., mRNA level of the NARG2 gene in human cells. Specifically, the SNPs EX10@−23A, EX12@48C, EX14@+15C, EX16@1757m, EX16@2306C, EX16@2547T and EX16@4025w are associated with the “low expression phenotype” while the EX10@−23C, EX12@48T, EX14@+15G, EX16@1757w, EX16@2306G, EX16@2547G and EX16@4025m are associated with “high expression phenotype.” Thus, the SNPs are particularly useful in predicting the NARG2 gene expression and also NMDA receptor gene expression in an individual.

[0574] Thus, in one aspect, the present invention encompasses a method for predicting in an individual NARG2 gene expression (mRNA and/or protein) level or NMDA receptor (NMDAR1) expression level, and the biological, pharmacological or pharmacokinetic consequences thereof.

[0575] In one embodiment, the present invention encompasses a method for predicting the pharmacokinetic consequences of NMDA receptor expression, i.e., the responsiveness of an individual to an NMDA receptor antagonist, or the dose of an NMDA receptor antagonist to be used in an individual, or potential toxicity of an NMDA receptor antagonist on an individual, which can all correlate with the NMDA receptor expression level. In specific embodiments, the individual is diagnosed of a disease, e.g., neurodegenerative disease (particularly ALS, Parkinson's disease, Alzheimer's disease), epilepsy, stroke, and other types of brain and spinal cord injury. Specifically, if one or more the SNPs EX10@−23A, EX12@48C, EX14@+15C, EX16@1757m, EX16@2306C, EX16@2547T and EX16@4025w are detected, or a SNP that is in linkage disequilibrium with any one of such SNPs is detected in the individual, then low expression of NARG2 and high expression of NMDAR1 are predicted, and the pharmacokinetic consequences are then predicted. More specifically, the individual's responsiveness to NMDA receptor antagonists is predicted. Selection of patients for inclusion in clinical trials involving an NMDA receptor antagonist can be made based on the predicted NMDA receptor expression. In addition, whether or not to treat the individual with an NMDA receptor antagonist and the dosage or other treatment regimen to be used can also be decided based on the SNP profile in NARG2 gene and the predicted NARG2 and NMDA receptor expression. For example, if a SNP associated with low NARG2 expression and thus high NMDAR1 expression is detected in an individual, then a higher dosage or more frequent treatment may be administered to the individual.

[0576] In another aspect, the present invention encompasses a method for predicting or detecting susceptibility to neurodegenerative disease in an individual, which comprises the step of genotyping the individual to determine the individual's genotype at one or more of the loci identified in the present invention, namely EX10@−23, EX12@48, EX14@+15, EX16@1757, EX16@2306, EX16@2547 and EX16@4025, or another locus at which the genotype is in linkage disequilibrium with one of the SNPs or haplotypes of the present invention. Thus, if one or more the SNPs EX10@−23A, EX12@48C, EX14@+15C, EX16@1757m, EX16@2306C, EX16@2547T and EX16@4025w are detected, or a SNP that is in linkage disequilibrium with any one of such SNPs is detected in the individual, then it can be reasonably predicted that the individual is at an increased risk of developing neurodegenerative disease, particularly ALS, Parkinson's disease, Alzheimer's disease and other types of brain and spinal cord injury. In particular, if an individual is homozygous with the genotype EX10@−23A/A, EX12@48C/C, EX14@+15C/C, EX16@1757m/m, EX16@2306C/C, EX16@2547T/T and EX16@4025w/w, then it can be reasonably predicted that the individual has an elevated susceptibility to neurodegenerative disease, particularly ALS, Parkinson's disease, Alzheimer's disease and other types of brain and spinal cord injury. If an individual is heterozygous, then his or her risk of developing neurodegenerative disease is at an intermediate level. On the other hand, if the individual is homozygous with the genotype EX10@−23C/C, EX12@48T/T, EX14@+15G/G, EX16@1757w/w, EX16@2306G/G, EX16@2547G/G and EX16@4025m/m, then it can be reasonably predicted that the individual has a reduced susceptibility to neurodegenerative disease, particularly ALS, Parkinson's disease, Alzheimer's disease and other types of brain and spinal cord injury.

[0577] In another aspect, the present invention provides a method for identifying high-risk patients who have a poor prognosis of neurodegenerative disease, or for the prognosis of a neurodegenerative disease, or predicting/determining the potential progression of a neurodegenerative disease. The individual to be tested can be a healthy person or an individual diagnosed with a neurodegenerative disease. The method comprises the step of genotyping the individual to determine the individual's genotype at one or more of the loci identified in the present invention, namely EX10@−23, EX12@48, EX14@+15, EX16@1757, EX16@2306, EX16@2547 and EX16@4025, or another locus at which the genotype is in linkage disequilibrium with one of the SNPs of the present invention. Thus, if one or more the SNPs EX10@−23A, EX12@48C, EX14@+15C, EX16@1757m, EX16@2306C, EX16@2547T and EX16@4025w are detected, or a SNP that is in linkage disequilibrium with any one of such SNPs is detected in the individual, then it can be reasonably predicted that the individual has poor prognosis. In other words the individual has a high potential of neurodegenerative disease progression. Particularly, if an individual is homozygous with the genotype EX10@−23A/A, EX12@48C/C, EX14@+15C/C, EX16@1757m/m, EX16@2306C/C, EX16@2547T/T and EX16@4025w/w, then the individual has particularly poor prognosis. However, if an individual is heterozygous with the genotype EX10@−23A/C, EX12@48C/T, EX14@+15C/G, EX16@1757m/w, EX16@2306C/G, EX16@2547T/G and EX16@4025w/m, then the individual has an intermediate level of risk of neurodegenerative disease progression, especially associated with ALS, Parkinson's disease, Alzheimer's disease and other types of brain and spinal cord injury. That is, the risk is greater than a person having a homozygous genotype of EX10@−23C/C, EX12@48T/T, EX14@+15G/G, EX16@1757w/w, EX16@2306G/G, EX16@2547G/G and EX16@4025m/m, but is lower than a person having a homozygous genotype of EX10@−23A/A, EX12@48C/C, EX14@+15C/C, EX16@1757m/m, EX16@2306C/C, EX16@2547T/T and EX16@4025w/w.

[0578] Thus, if the individual is homozygous with the genotype EX10@−23C/C, EX12@48T/T, EX14@+15G/G, EX16@1757w/w, EX16@2306G/G, EX16@2547G/G and EX16@4025m/m, then it can be reasonably predicted that the neurodegenerative disease in the individual will progress and that the individual has a good prognosis. That is, the individual does not have an increased risk or likelihood of neurodegenerative disease progression.

[0579] In yet another aspect, the present invention provides a method for predicting or detecting the ability to recover from brain and spinal cord injury in an individual, which comprises the step of genotyping the individual to determine the individual's genotype at one or more of the loci identified in the present invention, namely EX10@−23, EX12@48, EX14@+15, EX16@1757, EX16@2306, EX16@2547 and EX16@4025, or another locus at which the genotype is in linkage disequilibrium with one of the SNPs or haplotypes of the present invention. Thus, if one or more the SNPs EX10@−23C, EX12@48T, EX14@+15G, EX16@1757w, EX16@2306G, EX16@2547G and EX16@4025m are detected, or a SNP that is in linkage disequilibrium with any one of such SNPs is detected in the individual, then it can be reasonably predicted that the individual has a higher expression of NARG2 and is less prone to neuronal differentiation, and has worse prognosis of recovering from brain and spinal cord injury. In particular, if an individual is homozygous with the genotype EX10@−23C/C, EX12@48T/T, EX14@+15G/G, EX16@1757w/w, EX16@2306G/G, EX16@2547G/G and EX16@4025m/m, then it can be reasonably predicted that the individual has a high probability or likelihood of slow recovering from brain and spinal cord injury. If an individual is heterozygous, then his or her likelihood of recovery is at an intermediate level. On the other hand, if the individual is homozygous with the genotype EX10@−23A/A, EX12@48C/C, EX14@+15C/C, EX16@1757m/m, EX16@2306C/C, EX16@2547T/T and EX16@4025w/w, then it can be reasonably predicted that the NARG2 expression in the individual is lower and the individual has high probability of recovering from brain and spinal cord injury.

DDX58

[0580] As indicated in Tables 27 and 73 below, the expression level of the DDX58 gene in human cells is an inheritable “quantitative trait” with genetic determinants. Furthermore, the SNPs and/or haplotypes in accordance with the present invention are associated with the “quantitative trait”, i.e., mRNA level of the DDX58 gene in human cells. Specifically, the SNPs EX14@+78C and EX17@63A are associated with the “low expression phenotype” while the SNPs EX14@+78T, EX17@63C are associated with “high expression phenotype.” Thus, the SNPs are particularly useful in predicting the DDX58 gene expression in an individual. Furthermore, other SNPs that are in linkage disequilibrium with the SNPs can also have similar predictive value.

[0581] Thus, in one aspect, the present invention encompasses a method for predicting in an individual DDX58 (RIG-1) gene expression (mRNA and/or protein) level, and the biological, pharmacological or pharmacokinetic consequences thereof.

[0582] Thus, in one aspect, the present invention encompasses a method for predicting or detecting cancer susceptibility in an individual, which comprises the step of genotyping the individual to determine the individual's genotype at one or more of the loci identified in the present invention, namely EX14@+78 and EX17@63, or another locus at which the genotype is in linkage disequilibrium with one of the SNPs of the present invention. Thus, if one or more the SNPs EX14@+78T, EX17@63C are detected, or a SNP that is in linkage disequilibrium with any one of such SNPs is detected in the individual, then it can be reasonably predicted that the individual is at an increased risk of developing cancer, particularly skin cancer, lung cancer, ovarian cancer or thyoma. In particularly, if an individual is homozygous with the genotype EX14@+78T/T, EX17@63C/C, then it can be reasonably predicted that the individual has an elevated susceptibility to cancer. If an individual is heterozygous, then his or her risk of developing cancer is at an intermediate level. One the other hand, if the individual is homozygous with the genotype EX14@+78C, EX17@63A, then it can be reasonably predicted that the individual has a reduced susceptibility to cancer.

[0583] In another aspect, the present invention provides a method for identifying high-risk patients who have a poor prognosis of cancer, or for the prognosis of cancer, or predicting/determining the invasiveness and metastatic potential of tumor in a patient, particularly cancer patient, e.g., with cancer such as melanoma, colon cancer, lung cancer, ovarian cancer, non-small cell lung cancers (NSCLCs), and thyoma. The individual to be tested can be a healthy person or an individual diagnosed of cancer. In this aspect, in patients diagnosed with cancer, either normal tissue or cells, or tumor tissue or cells can be used in genotyping for germline genotype or somatic genotype in tumor samples. The method comprises the step of genotyping the individual to determine the individual's genotype in the sample at one or more of the loci identified in the present invention, namely EX14@+78 and EX17@63, or another locus at which the genotype is in linkage disequilibrium with one of the SNPs of the present invention. Thus, if one or more the SNPs EX14@+78T or EX17@63C are detected, or a SNP that is in linkage disequilibrium with any one of such SNPs is detected in the individual, then it can be reasonably predicted that the individual has high metastasis potential, that the cancer has poor prognosis and that the tumor cells are invasive. In other words, the individual has an increased likelihood or at an increased risk of cancer metastasis. Particularly, if an individual is homozygous with the genotype EX14@+78T/T or EX17@63C/C, then the individual has particular poor prognosis and that the tumor cells are highly invasive. In other words, the individual has a substantially increased likelihood or at a substantially increased risk of cancer metastasis. However, if an individual is heterozygous with the genotype EX14@+78T/C or EX17@63C/A, then the individual has poor prognosis and that the tumor cells are invasive. Specifically, the individual has an intermediate level of risk of cancer metastasis. That is, the risk is greater than a person having a homozygous genotype of EX14@+78C/C or EX17@863A/A, but is lower than a person having a homozygous genotype of EX14@+78T/T or EX17@63C/C.

[0584] Thus, if the individual is homozygous with the genotype EX14@+78C/C or EX17@63A/A, then it can be reasonably predicted that the tumor in the individual has low metastasis potential, that the cancer has good prognosis and that the tumor cells are not invasive. That is, the individual does not have an increased likelihood or increased risk of cancer metastasis.

[0585] In another aspect, the present invention provides a method for predicting in an individual immune response to viral infection, particularly infection of RNA viruses, and more particularly double-stranded RNA viruses. The method comprises the step of genotyping the individual to determine the individual's genotype at one or more of the loci identified in the present invention, namely EX14@+78 and EX17@63, or another locus at which the genotype is in linkage disequilibrium with one of the SNPs or haplotypes of the present invention. Thus, if one or more of the SNPs associated with high expression of DDX58 (EX14@+78T or EX17@63C, or a SNP that is in linkage disequilibrium with any one of such SNPs) is present in the individual, then it will be reasonable to predict that the individual has an increased likelihood of having a stronger immune response to viral infection, i.e., strong host antiviral response, particularly to double-stranded RNA viruses, e.g., paramyxoviruses, influenza virus and Japanese encephalitis virus. Such individuals will also have an increased resistance to viral infection, particularly RNA viruses, e.g., paramyxoviruses, HIV, HCV, influenza virus and Japanese encephalitis virus. In addition, individuals with such genotypes will also have an increased inflammatory response to viral infection, particularly double-stranded RNA viruses, e.g., paramyxoviruses, influenza virus and Japanese encephalitis virus.

[0586] Thus, if one or more the SNPs EX14@+78C or EX17@63A are detected, or a SNP that is in linkage disequilibrium with any one of such SNPs is detected in the individual, then it can be reasonably predicted that the individual will have a decreased resistance to viral infection, more attenuated host antiviral response, decreased immune response to viral infection, and relatively lower inflammatory response to viral infection, particularly double-stranded RNA viruses, e.g., paramyxoviruses, influenza virus and Japanese encephalitis virus. In other words, the individual has an increased likelihood of developing viral infection. Particularly, if an individual is homozygous with the genotype EX14@+78C/C or EX17@63A/A, then the individual has particularly poor immune response and low inflammatory response to viral infection. However, if an individual is heterozygous with the genotype EX14@+78T/C or EX17@63C/A, then the individual has intermediate resistance to viral infection and inflammatory response. Alternatively, if the individual is homozygous with the genotype EX14@+78T/T or EX17@63C/C, then it can be reasonably predicted that the individual will have an increased resistance to viral infection. In other word, the individual will have a reduced susceptibility viral infection, especially infection of double-stranded RNA viruses.

[0587] In yet another aspect, the present invention encompasses a method for predicting the pharmacokinetic consequences of DDX58 expression, e.g., the responsiveness of an individual to an anticancer agent or an antiviral agent, or the dose of an anticancer agent or an antiviral agent to be used in an individual, or potential toxicity of an anticancer agent or an antiviral agent on an individual, which can all correlate with the DDX58 or COX-2 expression level. In specific embodiments, the individual is diagnosed of a disease, e.g., cancer or viral infection (particularly infection of a RNA virus, especially double-stranded RNA virus). Specifically, if one or more of the SNPs EX14@+78C and EX17@63A are detected, or an LD SNP that is in linkage disequilibrium with any one of such SNPs is detected in the individual, then low expression of DDX58 is predicted, and the pharmacokinetic consequences are then predicted. More specifically, the individual's responsiveness to an anticancer or antiviral agent is predicted. Selection of patients for inclusion in clinical trials involving an anticancer (particularly COX-2 inhibitor or anti-DDX58) or antiviral agent (particularly RNA virus-specific antiviral agent) can be made based on the predicted DDX58 expression. In addition, the dosage or other treatment regimen to be used can also be decided based on the SNP profile in DDX58 gene and the predicted DDX58 expression. For example, if a SNP associated with low DDX58 expression is detected in a cancer patient, then a lower dosage of, or less frequent treatment with, a COX-2 inhibitor may be administered to the individual in the cancer patient, but the cancer patient may be less responsive to a COX-2 or DDX58 inhibitor. If a SNP associated with high DDX58 expression is detected, especially a homozygosity thereof, then a higher dosage of, or more frequent administration may be required, but the patient may be more responsive to a COX-2 or DDX58 inhibitor.

[0588] In another example, if a SNP associated with low DDX58 expression is detected in a patient, especially a homozygosity thereof, then a higher dosage of, or more frequent treatment with, an antiviral agent may be required for treating infection of a RNA virus. Particularly, a higher dosage of interferon may be required. If a SNP associated with high DDX58 expression is detected, especially a homozygosity thereof, then the patient may require a lower dosage of an antiviral agent, or less frequent administration thereof.

CD39

[0589] As indicated in Table 28 and 74, the expression level of the CD39 gene in human cells is an inheritable “quantitative trait” with genetic determinants. Furthermore, the SNPs in accordance with the present invention are associated with the “quantitative trait”, i.e., expression level of the CD39 gene in human cells. Specifically, the SNPs EX4@−10T and EX10@3061A are associated with the “low expression phenotype” while the SNPs EX4@−10C and EX10@3061G are associated with “high expression phenotype.” Thus, the SNPs are particularly useful in predicting the CD39 gene expression in an individual. Furthermore, other SNPs that are in linkage disequilibrium with the SNPs can also have similar predictive value.

[0590] Thus, in one aspect of the invention a method is provided for predicting or detecting susceptibility to vascular injury in an individual, which comprises the steps of genotyping the individual to determine the individual's genotype at one or more loci identified in the present invention wherein one or more of the SNPs associated with low expression phenotype of CD39 are detected in the individual, then it can be predicted that the individual has an increased risk of developing a metabolic or vascular disease. Thus, if one or more the SNPs EX4@−10T and EX10@3061A in CD39 are detected, or an LD SNP that is in linkage disequilibrium with any one of such SNPs is detected in the individual, then it can be reasonably predicted that the individual is at an increased risk of vascular injury. In particular, if an individual is homozygous with the genotype EX4@−10T/T or EX10@3061A/A, or homozygous with an LD SNP that is in linkage disequilibrium with any one or more of such SNPs, then it can be reasonably predicted that the individual has a increased susceptibility to vascular injury. In other words, such an individual has an increased likelihood or is at an increased risk of developing vascular disease or vascular injury. If an individual is heterozygous, then his or her risk of developing the disease is at an intermediate level. On the other hand, if the individual is homozygous with the genotype EX4@−10C/C and EX10@3061G/G, or a SNP that is in linkage disequilibrium with any one or more of such SNPs, then it can be reasonably predicted that the individual has a reduced susceptibility to vascular injury.

[0591] In another aspect, the present invention provides a method for determining the prognosis of an individual with vascular injury. The individual to be tested can be a healthy person or previously diagnosed individual. The method comprises the step of genotyping the individual to determine the individual's genotype at one or more of the loci identified in the present invention, or another locus at which the genotype is in linkage disequilibrium with one of the SNPs of the present invention. Thus, if one or more the SNPs EX4@−10T or EX10@3061A are detected, or an LD SNP that is in linkage disequilibrium with any one of such SNPs is detected in the individual, then it can be reasonably predicted that the individual has a high potential of disease progression and that the prognosis for the individual is poor, or recovery is difficult or slow. In other words, the individual has an increased likelihood or an increased risk of disease progression. Particularly, if an individual is homozygous with the genotype EX4@−10T/T or EX10@3061A/A, or a SNP that is in linkage disequilibrium with any one or more of such SNPs, then the individual has particular poor prognosis and that the disease will progress at an increased rate. In other words, the individual has a substantially increased likelihood or at a substantially increased risk of disease progression. However, if an individual is heterozygous with the genotype EX4@−10T/C or EX10@3061A/G, or is heterozygous with a SNP that is in linkage disequilibrium with any one or more of such SNPs, then the individual has a poor prognosis. Specifically, the individual has an intermediate level of disease progression.

[0592] In another aspect of the invention a method is provided for predicting or detecting susceptibility coronary disease in an individual, which comprises the steps of genotyping the individual to determine the individual's genotype at one or more loci identified in the present invention wherein one or more of the SNPs are detected in the individual, then it can be predicted that the individual has an increased risk of developing a metabolic or vascular disease. Thus, if one or more the SNPs EX4@−10C and EX10@3061G are detected, or a SNP that is in linkage disequilibrium with any one of such SNPs is detected in the individual, then it can be reasonably predicted that the individual is at a decreased risk of coronary disease. In particular, if an individual is homozygous with the genotype EX4@−10C/C or EX10@3061G/G, or a SNP that is in linkage disequilibrium with any one or more of such SNPs, then it can be reasonably predicted that the individual has a diminished risk of coronary disease. In other words, such an individual has an decreased likelihood or is at an decreased risk of developing coronary disease. If an individual is heterozygous, then his or her risk of developing the disease is at an intermediate level. On the other hand, if the individual is homozygous with the genotype EX4@−10T/T or EX10@3061A/A, or a SNP that is in linkage disequilibrium with any one or more of such SNPs, then it can be reasonably predicted that the individual has an elevated susceptibility to coronary disease.

[0593] In another aspect, the present invention provides a method for identifying patients with a high risk of transplant rejection. The individual to be tested can be a healthy individual or an individual in need of a transplant. The method comprises the step of genotyping the individual to determine the individual's genotype at one or more of the loci identified in the present invention, namely EX4@−10 and EX10@3061 in CD39, or another locus at which the genotype is in linkage disequilibrium with one of the SNPs of the present invention. Thus, if one or more the SNPs EX4@−10C and EX10@3061G are detected, or an LD SNP that is in linkage disequilibrium with any one of such SNPs is detected in the individual, then it can be reasonably predicted that the individual has low transplant rejection risk. Particularly, if an individual is homozygous with the genotype EX4@−10C/C or EX10@3061G/G, then the individual has particular low risk of transplant rejection. However, if an individual is heterozygous with the genotype EX4@−10T/C or EX10@3061A/G, then the individual has an intermediate risk of transplant rejection. Thus, if the individual is homozygous with the genotype EX4@−10T/T or EX10@3061A/A, or a homozygous LD SNP thereof then it can be reasonably predicted that the individual has a particularly increased risk of transplant rejection.

[0594] For example, in one embodiment, selection of a donor of transplant organ or tissue is aided by genotyping a donor candidate and determining the determine the individual's genotype at one or more of the loci identified in the present invention, namely EX4@−10 and EX10@3061 in CD39, or another locus at which the genotype is in linkage disequilibrium with one of the SNPs of the present invention. Specifically preferred donors should have a homozygous EX4169 −10C/C or EX10@3061G/G, or a homozygous LD SNP thereof. Individuals with a homozygous EX4@−10T/T or EX10@3061A/A, or a homozygous LD SNP thereof are preferably excluded as organ or tissue transplant donors.

[0595] In another aspect, the present invention provides a method for predicting and/or determining inflammatory response, particularly to irritants and immunogens. The method comprises the step of genotyping the individual to determine the individual's genotype at one or more of the loci identified in the present invention, namely EX4@−10 and EX10@3061 in CD39, or another locus at which the genotype is in linkage disequilibrium with one of the SNPs of the present invention. Thus, if the SNP EX4@−10T or EX10@3061A is detected, or an LD SNP that is in linkage disequilibrium with either of the SNPs is detected in the individual, then it can be reasonably predicted that the individual will have an increased inflammatory response, particularly in response to irritants and immunogens. Particularly, if an individual is homozygous with the genotype EX4@−10T/T or EX10@3061A/A, then the individual has particularly high inflammatory response. However, if an individual is heterozygous with the genotype EX4@−10T/C or EX10@3061A/G, then the individual has intermediate level of inflammatory response. Alternatively, if the individual is homozygous with the genotype EX4@−10C/C or EX10@3061G/G, then it can be reasonably predicted that the individual will have a decreased inflammatory response, especially in response to irritants and immunogens. Such prediction can be used in, e.g., determining the degree of harm of irritants and immunogens to a particular individual, and deciding on whether to administer an immunogen or vaccine to an individual and whether to include an individual to a clinical trial particularly a clinical trial involving an immunogen or vaccine.

[0596] In yet another aspect, the present invention encompasses a method for predicting the pharmacokinetic consequences of CD39 expression, e.g., the responsiveness of an individual to a drug, or the dose of a drug to be used in an individual, or potential toxicity of a drug on an individual, which can all correlate with the CD39 expression level.

[0597] In another aspect, the present invention relates a method of selecting individuals for inclusion in clinical trials. Such clinical trials can be on any drugs or medical or surgical procedures in which platelet aggregation, vascular injury, organ or tissue transplantation, or inflammatory response is a relevant factor for safety or efficacy concerns. Thus, the method generally comprises genotyping an individual to determine the genotype at one or more of the loci identified in the present invention, namely EX4@−10 and EX10@3061 in CD39, or another locus at which the genotype is in linkage disequilibrium with one of the CD39 SNPs of the present invention, and considering the genotype in making a decision as to whether or not to include the individual in a clinical trial.

[0598] The SNPs on Chromosome X at position 97,374,982 and position 97,536,166 have also been shown to be associated with CD39 mRNA levels. The Chromosome X SNPs associated with lower CD39 mRNA expression levels are 97,374,982G and 97,536,166G, whereas that associated with higher mRNA expression levels are 97,374,982A and 97,536,166C. In addition to those mentioned above, these SNPs may be utilized in the applications described above.

FKABP1a

[0599] As indicated in Table 30 and 75, the expression level of the FKBP1a gene in human cells is an inheritable “quantitative trait” with genetic determinants. Furthermore, the SNPs in accordance with the present invention are associated with the “quantitative trait”, i.e., FKBP1a mRNA levels in human cells. Specifically, the SNP EX5@8G is associated with a “low expression phenotype” while the SNP EX5@8A is associated with a “high expression phenotype.” Thus, the SNPs are particularly useful in predicting the level of FKBP1a gene expression in an individual. Furthermore, other SNPs that are in linkage disequilibrium with these SNPs can also have similar predictive value.

[0600] In one aspect, the present invention provides a method for determining the prognosis of an individual with nerve damage, which comprises the steps of genotyping and determining the FKBP1a genotype of the individual at EX5@8. The individual to be tested can be a healthy person or previously diagnosed individual. Thus, if the FKBP1a SNP EX5@8G is detected, or an LD SNP that is in linkage disequilibrium with such SNP is detected in the individual, then it can be reasonably predicted that the individual has low potential of recovery from nerve damage and/or decreased nerve regeneration and that the prognosis for the individual is poor. Particularly, if an individual is homozygous with the FKBP1a genotype EX5@8G/G, or a SNP that is in linkage disequilibrium with such SNP, then the individual has particularly poor prognosis and that the regeneration will progress at a decreased rate. If an individual is heterozygous with the FKBP1a genotype EX5@A/G, or is heterozygous with a SNP that is in linkage disequilibrium with SNP, then the individual has a moderately poor prognosis. Specifically, the individual has an intermediate rate of nerve regeneration. However, an individual homozygous with the FKBP1a genotype EX5@A/A will have improved recovery from nerve damage and increased rate of nerve regeneration following damage, and thus a better prognosis.

[0601] In another aspect of the invention, a method is provided for predicting or detecting response to treatment with macrolide immunosuppressant drugs such as rapamycin and FK506, which comprises the steps of genotyping the individual to determine the individual's FKBP1a genotype at the SNP identified in the present invention, wherein detection of the SNP in the individual is useful in predicting that the individual has an increased or decreased response to macrolide immunosuppressant drugs such as rapamycin and FK506 treatment, particularly in an individual diagnosed with cancer. Thus, if the FKBP1a SNP EX5@8A is detected, or a SNP that is in linkage disequilibrium with such SNP is detected in the individual, then it can be reasonably predicted that the individual will have an increased response to macrolide immunosuppressant drugs such as rapamycin and FK506 treatment. In particular, if an individual is homozygous with the FKBP1a genotype EX5@8A/A, or an LD SNP that is in linkage disequilibrium with this SNP, then it can be reasonably predicted that the macrolide immunosuppressant drug treatment will have an increased effectiveness in the individual. In other words, such an individual has an increased likelihood of successful treatment with macrolide immunosuppressant drugs such as rapamycin and FK506 treatment. If an individual is heterozygous, then his or her response to macrolide immunosuppressant drug treatment is predicted to be intermediate. On the other hand, if the individual is homozygous with the FKBP1a genotype EX5@8G/G, or a SNP that is in linkage disequilibrium with such SNP, then it can be reasonably predicted that treatment with macrolide immunosuppressant drugs such as rapamycin and FK506 will have decreased effectiveness and the individual will have a diminished response to treatment. The predicted response can be used as a criterion in deciding whether or how much to use a macrolide immunosuppressant drug on a particular individual, and in deciding whether to include an individual in a clinical trial in which FKBP1a gene expression is a factor affecting safety or efficacy, or in which a macrolide immunosuppressant drug is involved.

[0602] Thus, the present invention also provides a method of treating a patient with cancer comprising genotyping the patient in the FKBP1a gene to predict the patient's response to treatment with macrolide immunosuppressant drugs such as rapamycin and FK506, and deciding on whether to administer a macrolide immunosuppressant drug to the patient.

SRI

[0603] As indicated in Table 31 and 76, the expression level of the SRI gene in human cells is an inheritable “quantitative trait” with genetic determinants. Furthermore, the SNP in accordance with the present invention is associated with the “quantitative trait”, i.e., SRI mRNA levels in human cells. Specifically, the SNP EX9@351C is associated with a “low expression phenotype” while the SNP EX9@351T is associated with a “high expression phenotype.” Thus, the SNPs are particularly useful in predicting the level of SRI gene expression in an individual. Furthermore, other SNPs that are in linkage disequilibrium with the SNP can also have similar predictive value.

[0604] In another aspect, the present invention provides a method for identifying high-risk patients who have a poor prognosis of cancer, or for determining the prognosis of cancer, particularly in a cancer patient, e.g., with cancer such as acute myeloid leukemia (AML). The individual to be tested can be a healthy person or an individual diagnosed of cancer. The genotyping can be performed on a healthy tissue sample or a tumor sample to determine germline or somatic genotype. For example, the method can comprise the steps of genotyping the somatic tissues of an individual, and genotyping the cancer cells of that individual, to determine the genotype the SRI loci identified in the present invention, namely EX9@351, or another locus at which the genotype is in linkage disequilibrium with the SNP of the present invention. Thus, if the SRI SNP EX9@351T is detected, or a SNP that is in linkage disequilibrium with EX9@351T is detected in the individual, particularly within the cancer cells, then it can be reasonably predicted that the cancerous growth or tumor has high metastatic potential, that the patient has poor prognosis, and that the tumor cells of the cancer are likely invasive. In other words, the individual has an increased likelihood or is at an increased risk of cancer metastasis. Particularly, if an individual or their cancer is homozygous with the SRI genotype EX9@351T/T, then the individual has particularly poor prognosis and the cancer cells are likely highly invasive and give to rapid growth. However, if an individual, or their cancer, is heterozygous with the SRI genotype EX9@351T/C, then the individual has a moderately poor prognosis and the tumor cells are moderately invasive. Specifically, the individual has an intermediate level of risk of cancer metastasis, especially that associated with AML. That is, the clinical outcome is worse than a person having a homozygous SRI genotype of EX9@351C/C, but is better than a person having a homozygous SRI genotype of EX9@351T/T.

[0605] In another aspect, the present invention provides a method for predicting cancer remission rates in an individual diagnosed with cancer, especially acute myeloid leukemia (AML). The method comprises the steps of genotyping the healthy tissues of an individual, or the cancer cells of that individual, to determine the genotype the SRI loci identified in the present invention, namely EX9@351, or another locus at which the genotype is in linkage disequilibrium with the SNP of the present invention. Thus, if the SRI SNP EX9@351T is detected, or a SNP that is in linkage disequilibrium with EX9@351T is detected in the individual or their cancer cells, then it can be reasonably predicted that the individual has a low rate of remission. Particularly, if an individual, or their cancer, is homozygous with the SRI genotype EX9@351T/T, then the individual has particularly low rate of remission. However, if an individual, or their cancer, is heterozygous with the genotype EX9@351T/C, then the individual has an intermediate cancer remission rate, especially that associated with AML. That is, cancer remission rate is increased in a individual having a homozygous SRI genotype of EX9@351C/C in their somatic tissues or in their cancer, but is decreased in an individual having a homozygous SRI genotype of EX9@351T/T.

[0606] In yet another aspect, the present invention provides a method of predicting patient response to cancer treatment, especially to treatment with chemotherapeutics that inhibit DNA synthesis (such as doxorubicin and etoposide), inhibit protein synthesis (such as homoharringtonine) and antimicrotubule agents (such as vincristine). In accordance with the present invention, the SRI gene of a patient in need of chemotherapeutic treatment is genotyped in their healthy tissues or in a biopsy sample of their cancer cells, to determine the genotype at the EX9@351 locus of the present invention, specifically EX9@351, or another locus at which the genotype is in linkage disequilibrium with EX9@351 of the present invention. Expression levels of SRI can be utilized to predict the effectiveness of treatment in a patient. Further, the amount of resistance will be indicative successful recovery of a patient undergoing radiation therapy. If the SNP EX9@351T are detected, or a SNP that is in linkage disequilibrium with any one of such SNP is detected in an individual or their cancer, then it can be reasonably predicted that the cancer is more likely to be resistant cancer treatment using chemotherapeutics. In short, the individual will have a worse response, longer recovery time and poor prognosis. In the event that the individual has the SRI genotype EX9@351T/T, it can be reasonably predicted that the individual will have a decreased response to cancer treatment using chemotherapeutics. If the individual is heterozygous, it can be predicted that the individual will have an intermediate response to treatment. On the other hand, where an individual has the SRI genotype EX9@351C/C, then it can be reasonably predicted that the individual will have decreased resistance to cancer treatment involving chemotherapeutics.

[0607] In yet another aspect, the present invention encompasses a method for predicting or detecting an individual's ability to recover from heart disease, especially cardiomyopathy, which comprises the step of genotyping the individual to determine the individual's genotype the SRI loci identified in the present invention, namely EX9@351, or another locus at which the genotype is in linkage disequilibrium with the SNP of the present invention. Thus, if the SRI SNP EX9@351C is detected, or a SNP that is in linkage disequilibrium with the SNP is detected in the individual, then it can be reasonably predicted that the individual will have a decreased recovery rate for cardiovascular disease, especially for cardiomyopathy. In particular, if an individual is homozygous with the SRI genotype EX9@351C/C, then it can be reasonably predicted that the individual has a low ability to recover from cardiovascular disease. On the other hand, if the individual is homozygous with the SRI genotype EX9@351T/T, then it can be reasonably predicted that the individual has an increased ability to recover from cardiovascular disease.

[0608] The predicted response can be used as a criterion in deciding whether or how much to use a drug on a particular individual, and in deciding whether to include an individual in a clinical trial in which SRI gene expression is a factor affecting safety or efficacy.

XRRA1

[0609] As indicated in Table 32 and 77, the expression level of the XRRA1 gene in human cells is an inheritable “quantitative trait” with genetic determinants. Furthermore, the SNPs and/or haplotypes in accordance with the present invention are associated with the “quantitative trait”, i.e., XRRA1 mRNA level in human cells. Specifically, the SNPs EX2@26C, EX2@+40C, EX11@51C, EX13@62C and EX17@665G are associated with a “low expression phenotype” while the SNPs EX2@26G, EX2@+40T, EX11@51T, EX13@62G and EX17@665A are associated with a “high expression phenotype.” Thus, the SNPs are particularly useful in predicting the level of XRRA1 gene expression in an individual. Furthermore, other SNPs that are in linkage disequilibrium with the SNPs can also have similar predictive value.

[0610] In one aspect, the present invention encompasses a method for predicting or detecting sensitivity to ionizing radiation in an individual, which comprises the step of genotyping the individual to determine the individual's genotype at one or more of the XRRA1 loci identified in the present invention, namely EX2@26, EX2@+40, EX15@51, EX13@62 and EX17@665, or another locus at which the genotype is in linkage disequilibrium with one of the SNPs of the present invention. The genotyping can be performed on a healthy tissue sample or a disease tissue sample (e.g., tumor sample) to determine germline or somatic genotype. Thus, if one or more the XRRA1 SNPs EX2@26G, EX2@+40T, EX11@51T, EX13@62G and EX17@665A are detected, or a SNP that is in linkage disequilibrium with any one of such SNPs is detected in the individual, then it can be reasonably predicted that the individual has increased sensitivity to ionizing radiation. In particularly, if an individual is homozygous with the XRRA1 genotype EX2@26G/G, EX2@+40T/T, EX11@51T/T, EX13@62G/G and EX17@665A/A, then it can be reasonably predicted that the individual has an increased sensitivity to ionizing radiation. If an individual is heterozygous with the XRRA1 genotype EX2@26G/C, EX2@+40T/C, EX11@51T/C, EX13@62G/C and EX17@665A/G, then his or her sensitivity to radiation therapy is at an intermediate level. One the other hand, if the individual is homozygous with the XRRA1 genotype EX2@26C/C, EX2@+40C/C, EX11@51C/C, EX13@62C/C and EX17@665G/G, then it can be reasonably predicted that the individual has a decreased sensitivity to ionizing radiation.

[0611] The predicted XRRA1 expression level and sensitivity to ionizing radiation can be used as a criterion in deciding whether or how much to use ionizing radiation on a particular individual, and in deciding whether to include an individual in a clinical trial in which XRRA1 gene expression is a factor affecting safety or efficacy, or involving ionizing radiation.

[0612] Thus, a treatment method is provided comprising genotyping the patient in the XRRA1 gene to predict the patient's sensitivity to treatment with ionizing radiation, and deciding on whether to treat the patient with ionizing radiation or the dose thereof.

IRF5

[0613] As indicated in Tables 33, 78 and 79, the expression level of the IRF5 gene in human cells is an inheritable “quantitative trait” with genetic determinants. Furthermore, the SNPs in accordance with the present invention are associated with the “quantitative trait”, i.e., IRF5 mRNA levels in human cells. Specifically, the SNPs EX1@−709G, EX1@−396C, EX1@−82m, EX6@91m, EX9@801A and EX9@862A are associated with a “low expression phenotype” while the EX1@−709T, EX1@−396T, EX1@−82w, EX6@91w, EX9@801G and EX9@862G are associated with a “high expression phenotype.” Thus, the SNPs are particularly useful in predicting the level of IRF5 gene expression in an individual.

[0614] Thus, in one aspect, the present invention provides a method for predicting or determining immune response to viral infection in an individual. The method comprises the step of genotyping the individual to determine the individual's genotype at one or more of the IRF5 loci identified in the present invention, namely EX1@−709, EX1@−39C, EX1@−82, EX6@91, EX9@801 or EX9@862, or another locus at which the genotype is in linkage disequilibrium with one of the SNPs or haplotypes of the present invention. Thus, if one or more the SNPs EX1@−709G, EX1-396C, EX1@−82m, EX6@91m, EX9@801A or EX9@862A are detected, or a SNP that is in linkage disequilibrium with any one of such SNPs is detected in the individual, then it can be reasonably predicted that the individual will have a diminished immune response. In other words, the individual has an increased likelihood of developing viral infection. Particularly, if an individual is homozygous with the IRF5 genotype EX1@−709G/G, EX1@−396C/C, EX1@−82m/m, EX6@91m/m, EX9@801A/A or EX9@862A/A, then the individual has particularly poor immune response, especially to viral infection. However, if an individual is heterozygous with the IRF5 genotype EX1@−709G/T, EX1@−396C/T, EX1@−82m/w, EX6@91m/w, EX9@801A/G or EX9@862A/G, then the individual has intermediate immune response. Specifically, the individual has an intermediate level of risk of viral infection. Alternatively, if the individual is homozygous with the IRF5 genotype EX1@−709T/T, EX1@−396T/T, EX1@−82w/w, EX6@91w/w, EX9@801G/G or EX9@862G/G, then it can be reasonably predicted that the individual will have a good immune response. In other word, the individual will have a reduced susceptibility to infection, especially viral infection.

[0615] In another aspect, the present invention provides a method for identifying high-risk patients who have a poor prognosis of viral infection, or predicting/determining the invasiveness and viral progression in an individual. The individual to be tested can be a healthy person or an individual diagnosed with viral infection. The method comprises the step of genotyping the individual to determine the individual's genotype at one or more of the IRF5 loci identified in the present invention, namely EX1@−709, EX1@−39C, EX1@−82, EX6@91, EX9@801 or EX9@862, or another locus at which the genotype is in linkage disequilibrium with one of the SNPs of the present invention. Thus, if one or more the IRF5 SNPs EX1@−709G, EX1@−396C, EX1@−82m, EX6@91m, EX9@801A or EX9@862A are detected, or a SNP that is in linkage disequilibrium with any one of such SNPs is detected in the individual, then it can be reasonably predicted that the individual has a poor prognosis for viral infection, or a poor prognosis for viral invasiveness and progression. In other words, the individual has an increased likelihood or at an increased risk of viral infection. Particularly, if an individual is homozygous with the IRF5 genotype EX1@−709G/G, EX1-396C/C, EX1@−82m/m, EX6@91m/m, EX9@801A/A or EX9@862A/A, then the individual has particular poor prognosis. In other words, the individual has a substantially increased likelihood or at a substantially increased risk of viral progression after infection. However, if an individual is heterozygous with the IRF5 genotype EX1@−709G/T, EX1@−396C/T, EX1@−82m/w, EX6@91m/w, EX9@801A/G or EX9@862A/G, then the individual has an intermediate risk of viral progression. Thus, if the individual is homozygous with the IRF5 genotype EX1@−709T/T, EX1@−3 96T/T, EX1@−82w/w, EX6@91w/w, EX9@801 G/G or EX9@862G/G, then it can be reasonably predicted that individual will have a good prognosis. That is, the individual does not have an increased likelihood or increased risk of viral progression after infection.

[0616] In another aspect, the present invention encompasses a method for predicting or detecting susceptibility to autoimmune disease in an individual, which comprises the step of genotyping the individual to determine the individual's genotype at one or more of the IRF5 loci identified in the present invention, namely EX1@−709, EX1@−39C, EX1@−82, EX6@91, EX9@801 or EX9@862, or another locus at which the genotype is in linkage disequilibrium with one of the SNPs or haplotypes of the present invention. Thus, if one or more the IRF5 SNPs EX1@−709T, EX1@−396T, EX1@−82w, EX6@91w, EX9@801G and EX9@862G are detected, or a SNP that is in linkage disequilibrium with any one of such SNPs is detected in the individual, then it can be reasonably predicted that the individual is at an increased risk of developing an autoimmune disease, particularly Wegener's granulomatosis, multiple sclerosis, type 1 diabetes mellitus, lupus, and rheumatoid arthritis. In particularly, if an individual is homozygous with the IRF5 genotype EX1@−709T/T, EX1@−396T/T, EX1@−82w/w, EX6@91w/w, EX9@801G/G or EX9@862G/G, then it can be reasonably predicted that the individual has an elevated susceptibility to autoimmune disease, particularly Wegener's granulomatosis, multiple sclerosis, type 1 diabetes mellitus, lupus, and rheumatoid arthritis. Likewise, if the individual is homozygous with a IRF5 genotype at a locus that is in the same haplotype with the SNPs EX1@−709T/T, EX1@−396T/T, EX1@−82w/w, EX6@91w/w, EX9@801G/G or EX9@862G/G (in linkage disequilibrium), then it can reasonably be predicted that the individual has an elevated susceptibility to autoimmune disease, particularly Wegener's granulomatosis, multiple sclerosis, type 1 diabetes mellitus, lupus, and rheumatoid arthritis. In other words, such an individual has an increased likelihood or is at an increased risk of developing autoimmune disease, particularly Wegener's granulomatosis, multiple sclerosis, type 1 diabetes mellitus, lupus, and rheumatoid arthritis. If an individual is heterozygous, then his or her risk of developing autoimmune disease is at an intermediate level. One the other hand, if the individual is homozygous with the IRF5 genotype EX1@−709G/G, EX1@−396C/C, EX1@−82m/m, EX6@91m/m, EX9@801A/A or EX9@862A/A, then it can be reasonably predicted that the individual has a reduced susceptibility to autoimmune disease, particularly Wegener's granulomatosis, multiple sclerosis, type 1 diabetes mellitus, lupus, and rheumatoid arthritis. Similarly, if the individual is homozygous with a genotype at a locus that is in the same haplotype with the IRF5 SNPs EX1@−709G, EX1@−396C, EX1@−82m, EX6@91m, EX9@801A or EX9@862A (in linkage disequilibrium), then it can reasonably be predicted that the individual has a reduced susceptibility to autoimmune disease, particularly Wegener's granulomatosis, multiple sclerosis, type 1 diabetes mellitus, lupus, and rheumatoid arthritis.

[0617] The SNP at position 128,208,314 of chromosome 7, has also shows association with IRF5 mRNA expression levels. In addition to those mentioned above, these SNPs may be utilized in the applications described above.

AMFR

[0618] As indicated in Table 34, 35 and 80, the expression level of the AMFR gene in human cells is an inheritable “quantitative trait” with genetic determinants. Furthermore, the SNPs and/or haplotypes in accordance with the present invention are associated with the “quantitative trait”, i.e., AMFR mRNA levels in human cells. Specifically, the SNPs in Haplotype I (e.g., EX4@+14T, EX12@+62A, EX14@1359C) and the SNP EX14@483G are associated with a “low expression phenotype” while the SNPs in Haplotypes II (e.g., EX4@+14C, EX12@+62G, EX14@1359T) and the SNP EX14@483A are associated with a “high expression phenotype.” Thus, the SNPs and/or haplotypes are particularly useful in predicting the level of AMFR gene expression in an individual. Furthermore, other SNPs that are in linkage disequilibrium with the SNPs and/or haploytes can also have similar predictive value.

[0619] Thus, in one aspect, the present invention encompasses a method for predicting or detecting cancer susceptibility in an individual, which comprises the step of genotyping the individual to determine the individual's genotype at one or more of the AMFR loci identified in the present invention, namely EX4@+14, EX12@+62, EX14@1359 and EX14@483, or another locus at which the genotype is in linkage disequilibrium with one of the SNPs or haplotypes of the present invention. Thus, if one or more the AMFR SNPs EX4@+14C, EX12@+62G, EX14@1359T and SNP EX14@483A are detected, or a SNP that is in linkage disequilibrium with any one of such SNPs is detected in the individual, then it can be reasonably predicted that the individual is at an increased risk of developing cancer, particularly skin cancer, lung cancer, ovarian cancer or thyoma. In particularly, if an individual is homozygous with the AMFR genotype EX4@+14C/C, EX12@+62G/G, EX14@1359T/T or EX14@483A/A, then it can be reasonably predicted that the individual has an elevated susceptibility to cancer, particularly skin cancer (e.g., melanoma), lung cancer (e.g., NSCLCs), ovarian cancer or thyoma. Likewise, if the individual is homozygous with an AMFR genotype at a locus that is in the same haplotype with the SNPs EX4@+14C, EX12@+62G and EX14@1359T (in linkage disequilibrium), or in linkage disequilibrium with the SNP EX14@483A, then it can reasonably be predicted that the individual has an elevated susceptibility to cancer, particularly skin cancer (e.g., melanoma), lung cancer (e.g., NSCLCs) or thyoma. In other words, such an individual has an increased likelihood or is at an increased risk of developing cancer, particularly skin cancer (e.g., melanoma), lung cancer (e.g., NSCLCs) or thyoma. If an individual is heterozygous, then his or her risk of developing cancer is at an intermediate level. One the other hand, if the individual is homozygous with the AMFR genotype EX4@+14T/T or EX12@+62A/A or EX14@1359C/C or EX14@483G/G, then it can be reasonably predicted that the individual has a reduced susceptibility to cancer, particularly skin cancer, lung cancer, ovarian cancer or thyoma. Similarly, if the individual is homozygous with a genotype at an AMFR locus that is in the same haplotype with the SNPs EX4@+14T, EX12@+62A and EX14@1359C (in linkage disequilibrium), or in the same haplotype (linkage disequilibrium) with the SNP EX14@483G, then it can reasonably be predicted that the individual has a reduced susceptibility to cancer, particularly skin cancer, lung cancer or thyoma.

[0620] In another aspect, the present invention provides a method for identifying high-risk patients who have a poor prognosis of cancer, or for the prognosis of cancer, or predicting/determining the invasiveness and metastatic potential of tumor in a patient, particularly cancer patient, e.g., with cancer such as melanoma, lung cancer, ovarian cancer, non-small cell lung cancers (NSCLCs), and thyoma. The individual to be tested can be a healthy person or an individual diagnosed of cancer. The method comprises the step of genotyping the individual to determine the individual's genotype at one or more of the AMFR loci identified in the present invention, namely EX4@+14, EX12@+62, EX14@1359 and EX14@483, or another locus at which the genotype is in linkage disequilibrium with one of the SNPs or haplotypes of the present invention. Thus, if one or more the AMFR SNPs EX4@+14C, EX12@+62G, EX14@1359T and SNP EX14@483A are detected, or a SNP that is in linkage disequilibrium with any one of such SNPs is detected in the individual, then it can be reasonably predicted that the individual has high metastasis potential, that the cancer has poor prognosis and that the tumor cells are invasive. In other words, the individual has an increased likelihood or at an increased risk of cancer metastasis. Particularly, if an individual is homozygous with the AMFR genotype EX4@+14C/C, EX12@+62G/G, EX14@1359T/T or SNP EX14@483A/A, then the individual has particular poor prognosis and that the tumor cells are highly invasive. In other words, the individual has a substantially increased likelihood or at a substantially increased risk of cancer metastasis. However, if an individual is heterozygous with the AMFR genotype EX4@+14T/C, EX12@+62A/G, EX14@1359C/T or SNP EX14@483G/A, then the individual has poor prognosis and that the tumor cells are invasive. Specifically, the individual has an intermediate level of risk of cancer metastasis. That is, the risk is greater than a person having a homozygous AMFR genotype of EX4@+14T/T or EX12@+62A/A or EX14@1359C/C or EX14@483G/G, but is lower than a person having a homozygous genotype of EX4@+14C/C, EX12@+62G/G, EX14@1359T/T or SNP EX14@483A/A.

[0621] Thus, if the individual is homozygous with the AMFR genotype EX4@+14T/T or EX12@+62A/A or EX14@1359C/C or EX14@483G/G, then it can be reasonably predicted that the tumor in the individual has low metastasis potential, that the cancer has good prognosis and that the tumor cells are not invasive. That is, the individual does not have an increased likelihood or increased risk of cancer metastasis. Similarly, if the individual is homozygous with a genotype at a locus that is in the same haplotype with the SNPs EX4@+14T, EX12@+62A and EX14@1359C (in linkage disequilibrium), or in the same haplotype (linkage disequilibrium) with the SNP EX14@483G, then it can reasonably be predicted that the individual has a low metastasis potential, that the cancer has good prognosis and that the tumor cells are not invasive. In other words, the individual does not have an increased likelihood or increased risk of cancer metastasis.

[0622] In another aspect, the present invention provides a method for identifying high-risk patients who have cancerous growths or tumors, and who have a poor prognosis of recovery, or for predicting/determining the invasiveness and metastatic potential of the cancerous growth or tumor within a patient, particularly cancer patient, e.g., with melanoma, lung cancer, ovarian cancer, non-small cell lung cancers (NSCLCs), or thyoma. In this aspect of the invention, the methods comprise the step of genotyping the cancerous growth or tumor within the individual to determine the cancerous growth or tumor's genotype at one or more of the AMFR loci identified in the present invention, namely those listed above, or another locus at which the genotype is in linkage disequilibrium with one of the SNPs of the present invention.

[0623] Particularly, if the tumor or cancerous growth turns out to be homozygous with the AMFR genotype EX4@+14C/C, EX12@+62G/G, EX14@1359T/T or SNP EX14@483A/A, then the tumor or cancerous growth is likely highly invasive, and the patient has a particularly poor prognosis. In other words, the patient has a substantially increased likelihood or at a substantially increased risk of cancer metastasis because the tumor has a genotype expected to overexpress AMFR. However, the tumor or cancerous growth turns out to be heterozygous with the AMFR genotype EX4@+14T/C, EX12@+62A/G, EX14@1359C/T or SNP EX14@483G/A, then the tumor or cancerous growth is likely moderately invasive, and the patient has an intermediate prognosis. Specifically, the patient has an intermediate level of risk of cancer metastasis. That is, the risk is greater than a patient having a tumor or cancerous growth that has a homozygous AMFR genotype of EX4@+14T/T or EX12@+62A/A or EX14@1359C/C or EX14@483G/G, but is lower than a patient having a tumor or cancerous growth that homozygous genotype of EX4@+14C/C, EX12@+62G/G, EX14@1359T/T or SNP EX14@483A/A.

[0624] Thus, if the tumor or cancerous growth is homozygous with the AMFR genotype EX4@+14T/T or EX12@+62A/A or EX14@1359C/C or EX14@483G/G, then it can be reasonably predicted that the tumor or cancerous growth within the patient has a low metastatic potential, that the patient has a good prognosis, and that their tumor's cells are not likely to be highly invasive. That is, the patient does not have an increased likelihood or increased risk of cancer metastasis. Similarly, if the tumor or cancerous growth is homozygous with a genotype at an AMFR locus that is in the same haplotype with the SNPs EX4@+14T, EX12@+62A and EX14@1359C (in linkage disequilibrium), or in linkage disequilibrium with the SNP EX14@483G, then it can reasonably be predicted that the tumor or cancerous growth within the patient has a low metastatic potential, that the patient has a good prognosis, and that their tumor's cells are not likely to be highly invasive. In other words, the patient does not have an increased likelihood or increased risk of cancer metastasis.

[0625] In yet another aspect of the present invention, a method is provided for predicting drug response in a patient to treatment with inhibitors of VEGFRs. There are many inhibitors of VEGFR known in the art. For example, bevacizumab (Avastin® from Genentech, Inc.) is a recombinant humanized anti-VEGF antibody that inhibits the VEGFR functions. Avastino has approved in the US by the FDA for treating colon cancer. Other inhibitors of VEGFR include tyrosine kinase inhibitors such as SU5416, SU11248 and PTK787. Thus, in accordance with the present invention, the AMFR gene of a patient in need of treatment with a VEGFR inhibitor is genotyped to determine the genotype at one or more of the AMFR loci identified in the present invention, namely EX4@+14, EX12@+62, EX14@1359 and EX14@483, or another locus at which a genotype is in linkage disequilibrium with one of the SNPs or haplotypes of the present invention. Thus, if one or more the AMFR SNPs EX4@+14C, EX12@+62G, EX14@1359T and SNP EX14@483A are detected, or a SNP that is in linkage disequilibrium with any one of such SNPs is detected in the individual, then it can be reasonably predicted that the individual is likely to respond to treatment with an inhibitor of VEGFR. In other words, once an inhibitor of VEGFR is administered, there is an increased likelihood that the inhibitor will cause positive effect in the individual, including, e.g., shrinkage or elimination of tumor, increased death of tumor cells, etc.

[0626] Particularly, if an individual is homozygous with the AMFR genotype EX4@+14C/C, EX12@+62G/G, EX14@1359T/T or SNP EX14@483A/A, then the individual has a substantially increased likelihood of being responsive to treatment with a VEGFR inhibitor. If an individual is heterozygous with the AMFR genotype EX4@+14T/C, EX12@+62A/G, EX14@1359C/T or SNP EX14@483G/A, then the individual is still likely to respond to a VEGFR inhibitor. Specifically, the individual has an intermediate level of responsiveness to VEGFR inhibitors. That is, the degree of responsiveness is likely to be greater than that in a person having a homozygous AMFR genotype of EX4@+14T/T or EX12@+62A/A or EX14@1359C/C or EX14@483G/G, but is lower than a person having a homozygous genotype of EX4@+14C/C, EX12@+62G/G, EX14@1359T/T or SNP EX14@483A/A.

[0627] Thus, if the individual is homozygous with the AMFR genotype EX4@+14T/T or EX12@+62A/A or EX14@1359C/C or EX14@483G/G, then it can be reasonably predicted that there is an increased likelihood that the individual exhibits a low responsiveness to treatment with a VEGFR inhibitor. Similarly, if an individual is homozygous with a genotype at a locus that is in the same haplotype with the SNPs EX4@+14T, EX12@+62A and EX14@1359C (in linkage disequilibrium), or in the same haplotype (linkage disequilibrium) with the SNP EX14@483G, then it can reasonably be predicted that there is an increased likelihood that the individual has a low responsiveness to treatment with a VEGFR.

[0628] In specific embodiments, the individual in need of VEGFR inhibitor treatment is diagnosed as having cancer, e.g., colorectal cancer or ovarian cancer. Also, in certain embodiments, the VEGFR inhibitor is an antibody specifically immunoreactive with VEGF or VEGFR. In one example, such an antibody is bevacizumab (e.g., Avastin® from Genentech, Inc.).

[0629] Once the prognosis of a patient's response to VEGFR inhibitors is made, suitable treatment regimens (e.g., dosage and frequency of administration, and the like) can be decided based on the predicted responsiveness of the patient. For example, if the AMFR genotyping result suggests a low responsiveness by the patient to VEGFR inhibitors, then a higher dosage of VEGFR inhibitors would be desirably to the patient, or it may be simply decided that another class of drugs would be more suitable for the patient. Thus, in another aspect of the invention, a method is provided for determining a dosage of a VEGFR inhibitor to be administered to a patient, comprising determining the individual's genotype in the AMFR gene at one or more of the loci identified in the present invention, namely EX4@+14, EX12@+62, EX14@1359 and EX14@483, or another locus at which the genotype is in linkage disequilibrium with one of the SNPs or haplotypes of the present invention to determine the likely responsiveness of the patient, and determining accordingly the dosage of a VEGFR inhibitor to be administered to the patient, wherein the presence of one or more of the AMFR SNPs EX4@+14C, EX12@+62G, EX14@1359T and EX14@483A, or a SNP that is in linkage disequilibrium with any one of such SNPs would indicate that the patient is likely to respond to said VEGFR inhibitor at a lower dosage than another patient without the nucleotide variants. In one embodiment, the method is used in treating colon cancer. In other embodiments, the method is used in treating breast cancer, melanoma, ovarian cancer, brain cancer, neuroblastoma, uterine cancer, leukemia, lymphoma, head and neck cancer, thyroid cancer, gastrointestinal cancer, pancreatic cancer, liver cancer, etc. In preferred embodiments, the VEGFR inhibitor is an antibody specific to VEGF or VEGFR.

[0630] In another aspect of the invention, a method is provided for selecting an anti-cancer treatment for a patient, which comprises determining, in an AMFR gene in a sample isolated from the patient, the presence or absence of a nucleotide variant that is selected from the group consisting of EX4@+14C, EX12@+62G, EX14@1359T and EX14@483A, or a SNP that is in linkage disequilibrium with any one of such SNPs, wherein the presence of said nucleotide variant would indicate that the patient is likely to respond to a VEGFR inhibitor. Thus, if the AMFR genes in a patient contain one or more of the nucleotide variants of the present invention, then physicians or other decision makers may decide based on the genotyping result that it would be desirable to treat the patient with VEGFR inhibitors, particularly antibodies specifically immunoreactive with VEGF or VEGFR, e.g., bevacizumab (e.g., Avastin® from Genentech, Inc.). In one embodiment, the selection of treatment with a VEGFR inhibitor is based on the presence of a homozygous genotype of one or more of the above SNPs. In one embodiment, the method is used in selecting a treatment of colon cancer. In other embodiments, the method is used in selecting a treatment of NSCLCs, breast cancer, melanoma, ovarian cancer, thyoma, brain cancer, neuroblastoma, uterine cancer, leukemia, lymphoma, head and neck cancer, thyroid cancer, gastrointestinal cancer, pancreatic cancer, liver cancer, etc.

[0631] In yet another aspect of the present invention, a method is provided for selecting candidate human subjects for participation in a clinical trial involving a VEGFR inhibitor, which comprises (1) determining, in the AMFR gene of an individual, the presence or absence of a nucleotide variant that is selected from the group consisting of EX4@+14C, EX12@+62G, EX14@1359T and EX14@483A, or a SNP that is in linkage disequilibrium with any one of such SNPs, wherein the presence of said nucleotide variant would indicate that the patient is likely to respond to a VEGFR inhibitor; and (2) deciding whether to include said individual in the clinical trial. For example, if the patient has one or more of the nucleotide variants, then clinical trial for a VEGFR inhibitor may include that patient, particularly when the patient is homozygous in one or more of the SNPs. In one embodiment, the method is used in a clinical trial for testing a VEGFR inhibitor in colon cancer. In other embodiments, the method is used in selecting patients for inclusion in clinical trials for testing a VEGFR inhibitor in breast cancer, melanoma, ovarian cancer, brain cancer, neuroblastoma, uterine cancer, leukemia, lymphoma, head and neck cancer, thyroid cancer, gastrointestinal cancer, pancreatic cancer, liver cancer, etc. In preferred embodiments, the VEGFR inhibitor is an antibody specifically immunoreactive with VEGF or VEGFR.

### 8. Screening Assays

[0632] The present invention further provides a method for identifying compounds for treating or preventing symptoms amendable to treatment by alteration of TLK1, WARS2, ARTS2, MSR, AKAP9, DNAJD1, GOLPH4, RABEP1, TAP2, NARG2, DDX58, CD39, FKBP1a, SRI, XRRA1, IRF5 or AMFR protein activities. For this purpose, variant TLK1, WARS2, ARTS2, MSR, AKAP9, DNAJD1, GOLPH4, RABEP1, TAP2, NARG2, DDX58, CD39, FKBP1a, SRI, XRRA1, IRF5 or AMFR protein or fragment thereof containing a particular amino acid variant in accordance with the present invention can be used in any of a variety of drug screening techniques. Drug screening can be performed as described herein or using well known techniques, such as those described in U.S. Pat. Nos. 5,800,998 and 5,891,628, both of which are incorporated herein by reference. The candidate therapeutic compounds may include, but are not limited to proteins, small peptides, nucleic acids, and analogs thereof. Preferably, the compounds are small organic molecules having a molecular weight of no greater than 10,000 dalton, more preferably less than 5,000 dalton.

[0633] In one embodiment of the present invention, the method is primarily based on binding affinities to screen for compounds capable of interacting with or binding to a TLK1, WARS2, ARTS2, MSR, AKAP9, DNAJD1, GOLPH4, RABEP1, TAP2, NARG2, DDX58, CD39, FKBP1a, SRI, XRRA1, IRF5 or AMFR protein containing one or more amino acid variants. Compounds to be screened may be peptides or derivatives or mimetics thereof, or non-peptide small molecules. Conveniently, commercially available combinatorial libraries of compounds or phage display libraries displaying random peptides are used.

[0634] Various screening techniques known in the art may be used in the present invention. The TLK1, WARS2, ARTS2, MSR, AKAP9, DNAJD1, GOLPH4, RABEP1, TAP2, NARG2, DDX58, CD39, FKBP1a, SRI, XRRA1, IRF5 or AMFR protein variants (drug target) can be prepared by any suitable methods, e.g., by recombinant expression and purification. The polypeptide or fragment thereof may be free in solution but preferably is immobilized on a solid support, e.g., in a protein microchip, or on a cell surface. Various techniques for immobilizing proteins on a solid support are known in the art. For example, PCT Publication WO 84/03564 discloses synthesizing a large numbers of small peptide test compounds on a solid substrate, such as plastic pins or other surfaces. Alternatively, purified mutant TLK1, WARS2, ARTS2, MSR, AKAP9, DNAJD1, GOLPH4, RABEP1, TAP2, NARG2, DDX58, CD39, FKBP1a, SRI, XRRA1, IRF5 or AMFR protein or fragment thereof can be coated directly onto plates such as multi-well plates. Non-neutralizing antibodies, i.e., antibodies capable binding to the TLK1, WARS2, ARTS2, MSR, AKAP9, DNAJD1, GOLPH4, RABEP1, TAP2, NARG2, DDX58, CD39, FKBP1a, SRI, XRRA1, IRF5 or AMFR protein or fragment thereof but do not substantially affect its biological activities may also be used for immobilizing the TLK1, WARS2, ARTS2, MSR, AKAP9, DNAJD1, GOLPH4, RABEP1, TAP2, NARG2, DDX58, CD39, FKBP1a, SRI, XRRA1, IRF5 or AMFR protein or fragment thereof on a solid support.

[0635] To effect the screening, test compounds can be contacted with the immobilized TLK1, WARS2, ARTS2, MSR, AKAP9, DNAJD1, GOLPH4, RABEP1, TAP2, NARG2, DDX58, CD39, FKBP1a, SRI, XRRA1, IRF5 or AMFR protein or fragment thereof to allow binding to occur to form complexes under standard binding assays. Either the drug target or test compounds are labeled with a detectable marker using well known labeling techniques. To identify binding compounds, one may measure the formation of the drug target-test compound complexes or kinetics for the formation thereof.

[0636] Alternatively, a known ligand capable of binding to the drug target can be used in competitive binding assays. Complexes between the known ligand and the drug target can be formed and then contacted with test compounds. The ability of a test compound to interfere with the interaction between the drug target and the known ligand is measured using known techniques. One exemplary ligand is an antibody capable of specifically binding the drug target. Particularly, such an antibody is especially useful for identifying peptides that share one or more antigenic determinants of the TLK1, WARS2, ARTS2, MSR, AKAP9, DNAJD1, GOLPH4, RABEP1, TAP2, NARG2, DDX58, CD39, FKBP1a, SRI, XRRA1, IRF5 or AMFR protein or fragment thereof.

[0637] In another embodiment, a yeast two-hybrid system may be employed to screen for proteins or small peptides capable of interacting with a TLK1, WARS2, ARTS2, MSR, AKAP9, DNAJD1, GOLPH4, RABEP1, TAP2, NARG2, DDX58, CD39, FKBP1a, SRI, XRRA1, IRF5 or AMFR protein variant. For example, a battery of fusion proteins each contains a random small peptide fused to e.g., Gal 4 activation domain, can be co-expressed in yeast cells with a fusion protein having the Gal 4 binding domain fused to a TLK1, WARS2, ARTS2, MSR, AKAP9, DNAJD1, GOLPH4, RABEP1, TAP2, NARG2, DDX58, CD39, FKBP1a, SRI, XRRA1, IRF5 or AMFR protein variant. In this manner, small peptides capable of interacting with the TLK1, WARS2, ARTS2, MSR, AKAP9, DNAJD1, GOLPH4, RABEP1, TAP2, NARG2, DDX58, CD39, FKBP1a, SRI, XRRA1, IRF5 or AMFR protein variant can be identified. Alternatively, compounds can also be tested in a yeast two-hybrid system to determine their ability to inhibit the interaction between the TLK1, WARS2, ARTS2, MSR, AKAP9, DNAJD1, GOLPH4, RABEP1, TAP2, NARG2, DDX58, CD39, FKBP1a, SRI, XRRA1, IRF5 or AMFR protein variant and a known protein capable of interacting with the TLK1, WARS2, ARTS2, MSR, AKAP9, DNAJD1, GOLPH4, RABEP1, TAP2, NARG2, DDX58, CD39, FKBP1a, SRI, XRRA1, IRF5 or AMFR protein or polypeptide or fragment thereof. Again, one example of such proteins is an antibody specifically against the TLK1, WARS2, ARTS2, MSR, AKAP9, DNAJD1, GOLPH4, RABEP1, TAP2, NARG2, DDX58, CD39, FKBP1a, SRI, XRRA1, IRF5 or AMFR protein variant. Yeast two-hybrid systems and use thereof are generally known in the art and are disclosed in, e.g., Bartel et al., in: Cellular Interactions in Development: A Practical Approach, Oxford University Press, pp. 153-179 (1993); Fields and Song, Nature, 340:245-246 (1989); Chevray and Nathans, Proc. Natl. Acad. Sci. USA, 89:5789-5793 (1992); Lee et al., Science, 268:836-844 (1995); and U.S. Pat. Nos. 6,057,101, 6,051,381, and 5,525,490, all of which are incorporated herein by reference.

[0638] The compounds thus identified can be further tested for activities, e.g., in stimulating the niological activities of the variant TLK1, WARS2, ARTS2, MSR, AKAP9, DNAJD1, GOLPH4, RABEP1, TAP2, NARG2, DDX58, CD39, FKBP1a, SRI or XRRA1, e.g., in DNA mismatch repair.

[0639] Once an effective compound is identified, structural analogs or mimetics thereof can be produced based on rational drug design with the aim of improving drug efficacy and stability, and reducing side effects. Methods known in the art for rational drug design can be used in the present invention. See, e.g., Hodgson et al., Bio/Technology, 9:19-21 (1991); U.S. Pat. Nos. 5,800,998 and 5,891,628, all of which are incorporated herein by reference. An example of rational drug design is the development of HIV protease inhibitors. See Erickson et al., Science, 249:527-533 (1990). Preferably, rational drug design is based on one or more compounds selectively binding to a variant TLK1, WARS2, ARTS2, MSR, AKAP9, DNAJD1, GOLPH4, RABEP1, TAP2, NARG2, DDX58, CD39, FKBP1a, SRI, XRRA1, IRF5 or AMFR protein or a fragment thereof.

[0640] In one embodiment, the three-dimensional structure of, e.g., a TLK1, WARS2, ARTS2, MSR, AKAP9, DNAJD1, GOLPH4, RABEP1, TAP2, NARG2, DDX58, CD39, FKBP1a, SRI, XRRA1, IRF5 or AMFR protein variant, is determined by biophysics techniques such as X-ray crystallography, computer modeling, or both. Desirably, the structure of the complex between an effective compound and the variant TLK1, WARS2, ARTS2, MSR, AKAP9, DNAJD1, GOLPH4, RABEP1, TAP2, NARG2, DDX58, CD39, FKBP1a, SRI, XRRA1, IRF5 or AMFR protein is determined, and the structural relationship between the compound and the protein is elucidated. In this manner, the moieties and the three-dimensional structure of the selected compound, i.e., lead compound, critical to the its binding to the variant TLK1, WARS2, ARTS2, MSR, AKAP9, DNAJD1, GOLPH4, RABEP1, TAP2, NARG2, DDX58, CD39, FKBP1a, SRI, XRRA1, IRF5 or AMFR protein are revealed. Medicinal chemists can then design analog compounds having similar moieties and structures. In addition, the three-dimensional structure of wild-type TLK1, WARS2, ARTS2, MSR, AKAP9, DNAJD1, GOLPH4, RABEP1, TAP2, NARG2, DDX58, CD39, FKBP1a, SRI, XRRA1, IRF5 or AMFR protein is also desirably deciphered and compared to that of a variant TLK1, WARS2, ARTS2, MSR, AKAP9, DNAJD1, GOLPH4, RABEP1, TAP2, NARG2, DDX58, CD39, FKBP1a, SRI, XRRA1, IRF5 or AMFR protein. This will aid in designing compounds selectively interacting with the variant TLK1, WARS2, ARTS2, MSR, AKAP9, DNAJD1, GOLPH4, RABEP1, TAP2, NARG2, DDX58, CD39, FKBP1a, SRI, XRRA1, IRF5 or AMFR protein.

[0641] In another approach, a selected peptide compound capable of binding the TLK1, WARS2, ARTS2, MSR, AKAP9, DNAJD1, GOLPH4, RABEP1, TAP2, NARG2, DDX58, CD39, FKBP1a, SRI, XRRA1, IRF5 or AMFR protein variant can be analyzed by an alanine scan. See Wells, et al., Methods Enzymol., 202:301-306 (1991). In this technique, an amino acid residue of the peptide is replaced by Alanine, and its effect on the peptide's binding affinity to the variant TLK1, WARS2, ARTS2, MSR, AKAP9, DNAJD1, GOLPH4, RABEP1, TAP2, NARG2, DDX58, CD39, FKBP1a, SRI, XRRA1, IRF5 or AMFR protein is tested. Amino acid residues of the selected peptide are analyzed in this manner to determine the domains or residues of the peptide important to its binding to variant TLK1, WARS2, ARTS2, MSR, AKAP9, DNAJD1, GOLPH4, RABEP1, TAP2, NARG2, DDX58, CD39, FKBP1a, SRI, XRRA1, IRF5 or AMFR protein. These residues or domains constituting the active region of the compound are known as its “pharmacophore.” This information can be very helpful in rationally designing improved compounds.

[0642] Once the pharmacophore has been elucidated, a structural model can be established by a modeling process which may include analyzing the physical properties of the pharmacophore such as stereochemistry, charge, bonding, and size using data from a range of sources, e.g., NMR analysis, x-ray diffraction data, alanine scanning, and spectroscopic techniques and the like. Various techniques including computational analysis, similarity mapping and the like can all be used in this modeling process. See e.g., Perry et al., in OSAR: Quantitative Structure-Activity Relationships in Drug Design, pp. 189-193, Alan R. Liss, Inc., 1989; Rotivinen et al., Acta Pharmaceutical Fennica, 97:159-166 (1988); Lewis et al., Proc. R. Soc. Lond., 236:125-140 (1989); McKinaly et al., Annu. Rev. Pharmacol. Toxiciol., 29:111-122 (1989). Commercial molecular modeling systems available from Polygen Corporation, Waltham, Mass., include the CHARMm program, which performs the energy minimization and molecular dynamics functions, and QUANTA program which performs the construction, graphic modeling and analysis of molecular structure. Such programs allow interactive construction, visualization and modification of molecules. Other computer modeling programs are also available from BioDesign, Inc. (Pasadena, Calif.), Hypercube, Inc. (Cambridge, Ontario), and Allelix, Inc. (Mississauga, Ontario, Canada).

[0643] A template can be formed based on the established model. Various compounds can then be designed by linking various chemical groups or moieties to the template. Various moieties of the template can also be replaced. In addition, in case of a peptide lead compound, the peptide or mimetics thereof can be cyclized, e.g., by linking the N-terminus and C-terminus together, to increase its stability. These rationally designed compounds are further tested. In this manner, pharmacologically acceptable and stable compounds with improved efficacy and reduced side effect can be developed.

### EXAMPLE 1

### Generation of Expression and SNP Genotyping Data

[0644] Human lymphoblastoid cell lines were purchased from Coriell (Camden, N.J.). Cell lines were grown in RPMI1640 media containing 15% heat inactivated FBS, 2 mM L-glutamine and 1× antibiotic antimycotic to a density of 5×10⁵. Then fresh media was added and the cells were harvested 24 hours later. Total number of cells harvested for RNA isolation is approximately 10×10⁶, and for DNA is approximately 5×10⁶. RNA was prepared using the Ribopure kit provided by Ambion, Inc. DNA was isolated using a DNeasy Tissue kit from Qiagen.

[0645] RNA was converted to labeled cRNA using the protocol recommended by Affymetrix, Inc. High density Hu133A expression chips from Affymetrix were hybridized to the cRNA, washed, stained and scanned using the recommended protocols.

[0646] DNA template for the Centurion SNP chip was generated using the protocol recommended by Affymetrix Inc. Centurion SNP chips from Affymetrix were hybridized to the DNA template, washed, stained and scanned using the recommended protocols.

### EXAMPLE 2

### Linkage and Association Analysis of Expression and SNP Genotyping Data

[0647] mRNA expression data was extracted using RMA (robust multi-array average) as the summary measure for Affymetrix oligonucleotide array data. See Irizarry et al., Biostatistics, 4(2):249-264 (2003). RMA values were normalized by subtracting means for each sex. Association analysis between Affy SNP genotypes and mRNA levels was done by a standard statistical test. A subset of 10,000 SNPs from Affy 120K SNP chip was used for linkage analysis. See Thomas et al., Statistics and Computing, 10:259-269 (2000). MCLINK program was used to define inheritance at the subset of 10,000 SNPs. A blocked Gibbs sampler was used to fit finite normal mixtures to sex-corrected RMA data. These normal mixtures were used to create a linkage model where mRNA levels were treated as QTL phenotypes. See Ishwaran and James, J. Comp. Graph. Statist., 11(3):1-26 ((2002). Robust multipoint Lod scores for each mRNA level were calculated at all 10,000 SNP locations. See Abkevich et al., Genetic Epidemiology, 21 (Suppl 1):S492-497 (2001). Heritability estimation is done by MERLIN software. See Abecasis et al., Nat. Genet., 30:97-101 (2002).

[0648] The TLK1 mRNA expression level was identified to be inheritable at a LOD score of greater than 5.6. SNP probes in the TLK1 gene region were also associated with the mRNA expression levels at a p value of 1.5×10⁻¹³ or less. SNP probes in the WARS2 gene region were also associated with the mRNA expression levels at a p value of 2.5×10⁻⁸ or less. The ARTS1 mRNA expression level was identified to be inheritable at a LOD score of greater than 9.7. The MSR mRNA expression level was identified to be inheritable at a LOD score of greater than 4.3. SNP probes in the MSR gene region were also associated with the mRNA expression levels at a p value of 0.00634 or less. SNP probes in the AKAP9 gene region were also associated with the mRNA expression levels at a p value of 1.35e-08 or less. SNP probes in the DNAJD1 gene region were associated with the mRNA expression levels at a p value of 3.76×10⁻⁷ or less. The GOLPH4 mRNA expression level was identified to be inheritable at a LOD score of greater than 7.9. The RABEP1 mRNA expression level was identified to be inheritable at a LOD score of greater than 9.2. SNP probes in the RABEP1 gene region were also associated with the mRNA expression levels at a p value of 6.6×10⁻⁹ or less. The TAP2 mRNA expression level was identified to be inheritable at a LOD score of greater than 4.2. SNP probes in the NARG2 gene region were also associated with the mRNA expression levels at a p value of 3.6×10⁻⁷ or less. The TAP2 mRNA expression level was identified to be inheritable at a LOD score of greater than 4.2. SNP probes in the NARG2 gene region were also associated with the mRNA expression levels at a p value of 3.6×10⁻⁷ or less. The DDX58 mRNA expression level was identified to be inheritable at a LOD score of greater than 5.8. The CD39 mRNA expression level was identified to be inheritable at a LOD score of greater than 1.39. SNP probes in the CD39 gene region were also associated with the mRNA expression levels at a p value of 2.4×10⁻⁵ or less. The FKBP1a mRNA expression level was identified to be inheritable at a LOD score of greater than 5.3. SNP probes in the FKBP1a gene region were also associated with the mRNA expression levels at a p value of 31.9×10⁻⁵ or less. The SRI mRNA expression level was identified to be inheritable at a LOD score of greater than 2.86. SNP probes in the SRI gene region were also associated with the mRNA expression levels at a p value of 5.7×10⁻⁸ or less. The XRRA1 mRNA expression level was identified to be inheritable at a LOD score of greater than 3.8. SNP probes in the XRRA1 gene region were also associated with the mRNA expression levels at a p value of 4.0×10⁻⁶ or less.

### EXAMPLE 3

### Variant Discovery

[0649] To identify sequence variants that serve as diagnostics for predicting RNA levels, variant discovery was carried out on all exons of the TLK1, WARS2, ARTS2, MSR, AKAP9, DNAJD1, GOLPH4, RABEP1, TAP2, NARG2, DDX58, CD39, FKBP1a, SRI, XRRA1, IRF5 or AMFR gene and 1 kb of upstream regulatory sequence. The 30 parent individuals of the 15 families used in RNA profiling represent the genomic variability of the entire sample set and were therefore selected for variant detection.

[0650] For each exon and 1000 bases upstream of exon 1 two pairs of nested primers were designed using proprietary software. The nested primer pair was tailed with universal M13 primers. Primers were positioned to include a minimum of 30 bases of intronic sequence at either end of an exon in the final PCR product. This allows for examination of exon/intron boundaries. Large exons and continuous promoter sequence was amplified with overlapping primers sets. All amplicons were amplified using a robotic system and standard PCR conditions. PCR products were treated with shrimp alkaline phosphatase to remove free nucleotides and submitted to dye-primer sequencing using forward and reverse M13 sequencing primers. Products were separated on capillary sequencing machines (MegaBACE) and base-called using proprietary software. Detection of variants was performed by computer software that compares individual base-called sequence traces to a reference sequence.

[0651] Tables 36-80 show the association of the different SNPs and haplotypes with TLK1, WARS2, ARTS2, MSR, AKAP9, DNAJD1, GOLPH4, RABEP1, TAP2, NARG2, DDX58, CD39, FKBP1a, SRI, XRRA1, IRF5 or AMFR gene expression levels. For T-statistic calculation, a standard two-sample t-test assuming equal variances was performed to compare the mean expression values for individuals who carry a certain genotype and those who do not. The table gives the t-statistic and the p-value for a one-sided hypothesis test.

### EXAMPLE 4

### Discovery of Additional SNPs in Linkage Disequilibrium with the SNPs Associated with mRNA Levels

[0652] After the initial identification of the association of an mRNA level-associated SNP, a search for additional SNPs (or nucleotide variants) in linkage disequilibrium (LD) with the mRNA level-associated SNP (or nucleotide variant) is undertaken. For this purpose, the available LD data for the relevant chromosome of the CEU population of HapMap phase II can be downloaded and queried.

[0653] Parameters for the query are set to reveal other SNPs in LD with the mRNA level-associated SNP (or nucleotide variant) with r² values ≧0.8. The query identifies additional LD SNPs.

[0654] HapMap SNPs with r² values ≧0.8 are culled from the query if their distance from the seed SNP is too great, i.e., >100 kbp, or if the LD appears to have arisen by chance.

### EXAMPLE 5

### Identification of Alleles in Linkage Disequilibrium with the mRNA Level-Associated Allele

[0655] To determine which alleles at LD SNPs are in LD with the mRNA level-associated nucleotide variant, genotype calls for mRNA level-associated SNP and the identified LD SNPs from 90 individuals within the CEU population can be downloaded from HapMap and used to construct haplotypes. Frequencies of each haplotype are calculated. LD nucleotide variants are therefore identified based on such frequencies.

[0656] LD SNPs can be extrapolated using the “Single Nucleotide Polymorphism dbSNP search” tool, which is available from the National Center for Biotechnology Information, U.S. National Library of Medicine (Bethesda, Md., U.S.A.). as of the priority date or filing date. This can be done in accordance with the methods describes in this Example and in Example 4. Representative LD SNPs are shown in Table 81.

[0657] It is noted that the nucleotide sequences surrounding each of the SNPs are provided in Sequence Listing and as indicated in Tables 1-35. While there may be alternatively spliced variants of gene transcripts and the chromosome locations may change over time, the exon and intron numbering and the SNP positions of the present invention would be clearly understood by a skilled artisan by reference to the sequences in the sequence listing together with GenBank Accession Numbers or a variant or modification of this GenBank sequence. However, it is noted that the SNPs or nucleotide variants of the present invention are by no means limited to be only in the context of the sequences in the sequence listings or the particular GenBank entry referred to herein. Rather, it is recognized that GenBank sequences may contain unrecognized sequence errors only to be corrected at a later date, and additional gene variants may be discovered in the future. The present invention encompasses SNPs or nucleotide variants as referred to in Tables 1-35 irrespective of such sequence contexts. Indeed, even if the GenBank entries or chromosome locations referred to herein are changed based on either error corrections or additional variants discovered, skilled artisans apprised of the present disclosure would still be able to determine or analyze the SNPs or haplotypes of the present invention in the new sequence contexts.

[0658] All publications and patent applications mentioned in the specification are indicative of the level of those skilled in the art to which this invention pertains. All publications and patent applications are herein incorporated by reference to the same extent as if each individual publication or patent application was specifically and individually indicated to be incorporated by reference.

[0659] Although the foregoing invention has been described in some detail by way of illustration and example for purposes of clarity of understanding, it will be obvious that certain changes and modifications may be practiced within the scope of the appended claims.

What is claimed is:

1. An isolated nucleic acid or the complement thereof, said isolated nucleic acid comprising a contiguous span of at least 18 nucleotide residues of:
(a) an ARTS nucleic acid, at least one of said residues being a nucleotide variant of EX1@−1125 or EX12@44;
(b) a DNAJD1 nucleic acid, at least one of said residues being a nucleotide variant of EX5@+72; and
(c) a RABEP1 nucleic acid, at least one of said residues being a nucleotide variant of EX1@−551, EX18@646 or EX18@690.

2. A DNA microchip comprising one or more said isolated nucleic acid according to claim 1.

3. A method of genotyping a human individual, comprising detecting, or determining the presence or absence of, a nucleotide variant of claim 1 in said individual.

4. A method of predicting the expression of a gene in a human subject, comprising determining the presence or absence of a nucleotide variant associated with high gene expression phenotype, wherein:
(a) said gene is TLK1 and said nucleotide variant is chosen from the group of EX7@+63G, EX7@+190T, EX11@51A, EX25@855G and an LD SNP thereof;
(b) said gene is WARS2 and said nucleotide variant is chosen from the group of EX1@−963A, EX1@−103C, EX6@780A, EX6@842G and EX6@2152A, and LD SNPs thereof;
(c) said gene is ARTS1 and said nucleotide variant is chosen from the group of EX1@−1125T, EX2@397G, EX20@1085A, EX6@126A, EX12@44G, EX15@74G, EX6@149T, EX8@−10A, EX9@39T, EX9@+18T, EX11@59A, EX12@−28T, EX12@−7A, EX15@88C, EX19@173C, EX19@328m, EX19@885T, EX20@2105C, EX20@719C and EX20@1038A;
(d) said gene is MSR and said nucleotide variant is chosen from the group of EX1@−674T, EX1@19T, EX1@+129m, EX5@123C, EX5@136T, EX7@146A, EX10@+83A, EX11@+54T, EX14@14C, EX14@106G, EX14@142A and EX15@686G, and LD SNPs thereof.

5. A method of predicting the pathological, pharmacological or pharmacokinetic characteristic of a human subject, comprising:
determining the genotype at a loci of in Tables 1-35 and Table 81, said genotype is associated with a specific gene expression phenotype; and
predicting a pathological, pharmacological or pharmacokinetic characteristic of a human subject according to said specific gene expression phenotype.

6. The method of claim 5, wherein the TLK1 gene is genotyped, and where the presence of one or more of the SNPs EX7@+63G, EX7@+190T, EX11@51A, EX25@855G and LD SNPs thereof would indicate that the individual has an increased susceptibility to diseases associated with DNA damage including cancer.

7. The method of claim 5, wherein WARS2 gene is genotyped and wherein the presence of one or more of EX1@−963A, EX1@−103C, EX6@780A, EX6@842G and EX6@2152A, and LD SNPs thereof would indicate that the human subject has an increased likelihood of developing cardiovascular disease, cancer or neurodegenerative disease, or has a poor prognosis of such a disease.

The application's sequence listing, which the Patent Office published only in electronic form, follows.

SEQUENCE LISTING (415 sequences)

SEQ ID NO: 1 - DNA, 4289 bp, Homo sapiens
gcgggcctccctgtaccctctccttccctcacctctttcctccccacctcccctcttctcggtttcctcccccatccccttgactctcccctcccagccctcgctctctcgctcgccctcccgccatgacggaggcgggtgccggtgccgttgccgccgctgccgtcgcagggggggagtcgggttcccagaaagtagcttgatgagtgtccaaagtagcagtggaagtttggaggggccgccatcttggtcccagctctccacgtctccaaccccgggctcggcggcggcggccaggtccctgctgaatcacacgccgccatccgggaggcccagggaaggtgcaatggatgagcttcatagtctggatccaagaaggcaagagttattggaagctagatttactggagttgcaagtgggagcactggaagtacgggcagttgcagtgttggagctaaagcctcaacaaataacgaaagctctaatcacagttttggaagcttggaatctttaagtgataaagaatcagagacaccggagaagaaacaatcggaatcatccaggggaagaaagagaaaagcagaaaaccagaatgaaagtagtcaggggttccccaacctcccggtcttccagtccttggcctattgggaaatgggtcgtacagcaggaggaaaaagtattgggggacgtggccacaaaattagcgactattttgaataccagggtggaaatggctcaagtccagtaagaggcatacctcctgcaatccgttctcctcaaaattcacattcacattccactccttcctcatctgttcgaccgaatagcccttctcctactgcattagcatttggggaccaccctattgtacaaccaaagcaattatcctttaaaattattcagactgatctcacgatgctgaaattagcagcattagaaagtaataaaatcctagacctggaaaagaaggagggacgtatagatgatttgctcagggccaactgtgatctcagacggcaaatagatgaacaacaaaaattacttgacaaatacaaggaacgattaaataagtgcatatcaatgagcaagaaacttcttatagaaaagagtacacaagaaaagctgtcaagcagagagaagagtatgcaagatcgattacgcctcgggcactttacaacagttagacatggcgcttcatttactgaacaatggacagatggttttgcatttcagaatcttgtgaagcaacaagaatgggtgaatcagcaaagggaagatattgaaaggcaaaggaaacttctagccaaacgcaaacctcccacagctaataattctcaggcaccctctaccaattctgagccaaaacaaaggaaaaacaaagcagtcaatggagctgagaatgatccctttgttagaccaaatttgccacaactgttgacgttggcagaatatcatgaacaggaagaaattttcaaacttagactaggacatctcaaaaaggaagaggcaggaatccaggcagaacttgaacgtttggaaagagtcaggaatcttcacatacgtgagctgaaaagaatacacaatgaagataattcacagttcaaagatcatccaacattaaatgaaagatatttattacttcatctgcttggtagaggtggctttagtgaagtggataaggcttttgacctttctgaacaaagatatgctgctgtgaagatacatcagcttaataaaagctggagagatgagaagaaagaaaactaccacaaacatgcctgcagagagtatagaatacacaaagaactggatcaccccagaatagttaaactctatgattatttctccttggatacagatacgttttgtacagtgttagaatactgtgaaggcaatgacttggatttctatctgaagcaacacaagttaatgtcagagaaagaagctcggtctattgtaatgcagattgtaaatgcattaagatatctcaatgagatcaaaccccctattatacattatgatcttaagccaggaaacatcctactggtagatggaacagcatgtggtgaaatcaaaatcactgattttggtctgtccaagattatggatgatgatagctatggtgtagatggaatggttctaacttcccagggggcaggcacttactggtatttacctcctgagtgttttgtggttggaaaagagccaccaaagatttccaacaaggttgatgtatggtcggttggagtcatcttctatcagtgtctttatggtagaaagccatttggtcacaatcaatctcaacaagacattcttcaagagaatacaatattaaaagccacagaagtccagttccctgtaaaaccggttgtaagcagtgaagccaaggcatttattagacgctgtttggcatatcgaaaagaagatcgatttgatgtgcaccagctggcatgtgacccataccttctcccacacatgcgaagatcaaattcttcaggaaacctacacatggctgggctgacagcatcccctacacccccttcttcaagcataattacttactgactttcctccaagattggcatgatatctttgaatttgcttccagatgcacacttaagtttgagagcatttgagtgtttgttttctttttcttttttttttttttttttttttttacacaagacgtggttaagaactgtttgtgaactgaagttcctcatagtgtcatttgtatgagagaggatcatggacaatgaataaatgcacacttctgactataattttgagcagtgaaggaaggatgactgcctgttacacaggaacaggaataccatgttaagatagaggaaaaaaattttgtttatttgggggaacactgtaaataacgtttataatacttaaatacatttggttgttactagagagttctaatatgaagggtagtttttcattatttaaaaacacatggataaatatgagacatatttctaacatacgaactatagtgcctggatacattcttcagcatttggcagttaatctgctgaaaccaaagtaagaactgaatgacagtgacagttgtgttttatagtaatagaatgtgacagttagaatctttggacaaagttaggctttgtcatttgcctattcagacttttaccaagttggtcctcgagatcacatgtccgttttctttcactggttatattaaagggagagctattatttctaaatactttacacctttgacaagaatgagctgcttgtgttgaaatcagttgaattcactaaattataatattgccagtgttttcaacacgttagaattgataacaggtatttttcttttgttaccaggccttgttcatcaaaacaggtgacagtgagtaaccaaatgcagaccagttctatgcaggataatgataaattcccttctagctctattgtaaattgttgtacagatgtcatatttcaattactaagtttcagcagcttattcttgtacaaatgtttaaaatatggcttttctaattggatattgtattttttttaagtcttcttgaaggcactctaattgctgctaaatgatgttgcttctttgctaaaaaattaaatgacctagaaggtgcaagttgactgtacatcatagatattaaaaagcagacagtcattaacaatcaagatgtaaaagtgatccatgttggacataattgagtttttaaatcagtttattgggttctagggctgtagaacacatagatactagatttttaatttgttcatggttattctacatttctagaaagttcttatcagcaagatggtcccataaggaaatttcttgtggtttgtccagatttgttaaaatgtgaacgttttctaactgcctcgtagggtagaaaccaatatttttcaggatgctgtatttcactcctgtaaggactttttctttattgtcacattcataatgctgatacttacatgtaagttgttcatgttgcagaaaaaggttatacgtaccacggattctctttaatattgtacagttaaactgtatttctgatgttgcaagccattttgttttttcattggacatagacacattgtctctttaaaatgctgctgaaattgtagagagtatagccaaaacagtaataaacaatgacaggtaaaatgtaaagactatgaaaattacattggaagggagctttcaagatggtaggatattgactaactgagctccttcacttaaaaatcagctggataaattccttaagtatacttc

SEQ ID NO: 2 - protein, 787 aa, Homo sapiens
MSVQSSSGSLEGPPSWSQLSTSPTPGSAAAARSLLNHTPPSGRPREGAMDELHSLDPRRQELLEARFTGVASGSTGSTGSCSVGAKASTNNESSNHSFGSLESLSDKESETPEKKQSESSRGRKRKAENQNESSQGFPNLPVFQSLAYWEMGRTAGGKSIGGRGHKISDYFEYQGGNGSSPVRGIPPAIRSPQNSHSHSTPSSSVRPNSPSPTALAFGDHPIVQPKQLSFKIIQTDLTMLKLAALESNKILDLEKKEGRIDDLLRANCDLRRQIDEQQKLLDKYKERLNKCISMSKKLLIEKSTQEKLSSREKSMQDRLRLGHFTTVRHGASFTEQWTDGFAFQNLVKQQEWVNQQREDIERQRKLLAKRKPPTANNSQAPSTNSEPKQRKNKAVNGAENDPFVRPNLPQLLTLAEYHEQEEIFKLRLGHLKKEEAGIQAELERLERVRNLHIRELKRIHNEDNSQFKDHPTLNERYLLLHLLGRGGFSEVDKAFDLSEQRYAAVKIHQLNKSWRDEKKENYHKHACREYRIHKELDHPRIVKLYDYFSLDTDTFCTVLEYCEGNDLDFYLKQHKLMSEKEARSIVMQIVNALRYLNEIKPPIIHYDLKPGNILLVDGTACGEIKITDFGLSKIMDDDSYGVDGMVLTSQGAGTYWYLPPECFVVGKEPPKISNKVDVWSVGVIFYQCLYGRKPFGHNQSQQDILQENTILKATEVQFPVKPVVSSEAKAFIRRCLAYRKEDRFDVHQLACDPYLLPHMRRSNSSGNLHMAGLTASPTPPSSSIITY

SEQ ID NO: 3 - DNA, 101 bp, Homo sapiens
ccagtgagcattaccgcctaagctcggcctcctgtcagatcagcggcagcattagattctcataggagtgtgaaccttattgtgaactgcacatgcaaggg

SEQ ID NO: 4 - DNA, 101 bp, Homo sapiens
aatctaatgcctgatgatctgaggtggaaccgtttcatcccaaaaccatcccccctactccccgcagtctgtggataaattgtcttccacaaaactggtcc

SEQ ID NO: 5 - DNA, 101 bp, Homo sapiens
actgatctcacaatgctgaaattagcagcattagaaagtaataaaatccaagacctggaaaagaaggagggacgtatagatgatttgctcagggtaagtaa

SEQ ID NO: 6 - DNA, 101 bp, Homo sapiens
tctttcactggttatattaaagggagagctattatttctaaatactttacgcctttgacaaaatgagctgcttgtgttgaaatcagttgaattcactaaat

SEQ ID NO: 7 - DNA, 101 bp, Homo sapiens
atttgattttcttcattgtagaatctatagatagcttagcaacagttagayttatttcatggtgggtcattcaggcttacagattacatagttagcctcct

SEQ ID NO: 8 - DNA, 101 bp, Homo sapiens
agaagtgaattgcttttttttttttttaccaggaacttaatggagcagaartattaacggtatcttgtaggacagcttttcctaactttatttttattgta

SEQ ID NO: 9 - DNA, 101 bp, Homo sapiens
cagaagtattaacggtatcttgtaggacagcttttcctaactttatttttrttgtagctcaagccaaaaaatgtattttccattgcaaccagtacatacta

SEQ ID NO: 10 - DNA, 101 bp, Homo sapiens
tcccaatactgataacagatatcaagagataattcaacactatgtcctcartatccagttcacggcctggctcacagtaatggctcaataaatattcgaga

SEQ ID NO: 11 - DNA, 1064 bp, Homo sapiens
gccaatctttagccataagatctatggctgtgaacccatgacttactggtgtatatagggcactggaagcaaggaatgtatttgcagcaactgtctttatggaaggaagggtaagtcattttagtgccttttctgaggtgtattgtattttgtatctcagtttacactgagctcctttttggtcttagtgtagcctcccccaggttgtagttagtggacttggagctttatttattgtaaagatataaactcaaaaacaagcccccgaataagatgaggcttctggattggttgaaccatgtttttttcctttgtggtctgccatctacagatttgtctgattatctttgtttttaggatggttgcctaaattgttttttcttgtttcaccttcctcacttatatttgctttagtctggctttcagtgttttttccccccttcctttggagtaaacttgacttcaagtccaaagcagacctctcctctcatcttctgcagggttccccaacctcccggtcttccagtccttggcctattgggaaatgggtcgtacagcaggaggtgagcagcgggccagtgagcattaccgcctaagctcggcctcctgtcagatcagcggcagcrttagattctcataggagtgtgaaccttattgtgaactgcacatgcaagggatccaggttatgcactcccttatgagaatctaatgcctgatgatctgaggtggaaccgtttcatcccaaaaccatcycccctactccccgcagtctgtggataaattgtcttccacaaaactggtccctggtgccaaaaaggtggggaactactgatcttatggactagattggtcatatgtccattccaaaactagttaggaccaacagaggtactattgccttaaaaaaaatcaggccatctgtaggtggatagtgtcagaaatttaaaaaaagaaaaaaatcagggccatctttgaacctggaaatggaattaagttcttaaacatacagcctgtatggagaagggatgatacttgaacaaaattggatttctaataagaaggtg

SEQ ID NO: 12 - DNA, 1094 bp, Homo sapiens
atacatcataggggctacagttaaaaacaatattttgtgtatatgaaaattgctaagagagtagattttattcacaccacaaaaaaaagatatgtgttaaataacttgatttagccattccacattgtatatacatatatcaaaacatcgtgttgtgtaccataaatagataggtttttacttatcaatttaaaaaaggtcttgcaaaattcaaaaaaatcaactagaggaacgtatagcacaaagcagcggatatattgaattataatgaggaacatcagtattctaagtaattggcctttctagatgtttcttggtaagtctgtagcatttatacacttgaagttattaaaactgcactaaaactttttgagattcactttacatatacacacaaatatatttttctttaccttttgaatttggagtaaaatctagttttatgtttgcttgaaacaacatatataatggagataataaaataactttttttcatttagactgatctcacaatgctgaaattagcagcattagaaagtaataaaatccargacctggaaaagaaggagggacgtatagatgatttgctcagggtaagtaatgagtcatagaggggaaaaaaattgaataaattatttggcaacagtcaaactgttcagaaaatacttagcattgtaaaaaaatctgtagctaggccaggcgcagtggctcatgcctgtaatcccagcactttgggaggtcgaggcgggcagatcacaaggttgagagatcaagagcatcctggccaacatggtgaaaccccgtttctactaaaaatacaaaaattggctgggcatggtggtgcgtgcctgtagtgccagctacttgggaggctgaggcagcagaaatgcttgaacccgggaggtggagattgcagtgagctgagatcacgtcactgtactccagcctggcgacagagtgagactctgtctcagaaaaaaaaaaaattctgtagctagaactcaataagctttttctgttagtttaagtacatgattgaaaaataccaattttaaagtgaaatattttattagatcttcaataaattgggaatt

SEQ ID NO: 13 - DNA, 2609 bp, Homo sapiens
gtaaagtgaaccactgcaggggcttcaagcagtgagttgcatttggagtgagaattttctagctacagaattttttttttaaggtttgaacttccaataaaatgagatctacttatgtcttaaatgtgtccatccttctgctgattcagttgattgatatttagaagggaaaaagatcattaattgctaacatttcctttctctttttgaggcatttataagacgctgtttggcatatcgaaaagaagatcgatttgatgtgcaccagctggcaaatgacccataccttctcccacacatgagaagatcaaattcttcaggaaacctacacatggctgggctgacagcatcccctacacccccttcttcaagcataattacttactgactttcctccaagattggcatgatatctttgaatttgcttccagatgcacacttaagtttgagagcatttgagtgtttgttttctttttcttttttttttttttttttttttacacaagacgtggttaagaactgtttgtgaactgaagttcctcatagtgtcatttgtatgagagaggatcatggacaatgaataaatgcacacttctgactataattttgagcagtgaaggaaggatgactgcctgttacacagaaacaggaataccatgttaagatagaggaaaaaaattttgtttatttgggggaacactgtaaataacgtttataatacttaaatacatttggttgttactagagagttctaatatgaagggtagtttttcattatttaaaaacacatggaaaaatatgagacatatttctaacatacgaactatagtgcctggatacattcttcagcatttggcagttaatctgctgaaaccaaagtaagaactgaatgacagtgacagttgtgttttatagtaatagaatgtgagagttagaatctttggacaaagttaggctttgtcatttgcctattcagacttttaccaagttgtacctcgagatcacatgtccgttttctttcactggttatattaaagggagagctattatttctaaatactttacrcctttgacaaaatgagctgcttgtgttgaaatcagttgaattcactaaattataatattgccagtgttttcaacacgttagaattgataacaggtatttttcttttgttaccaggccttgttcatcaaaacaggtgacagtgagtaaccaaatgcagaccagttctatgcaggataatgataaattcccttctagctctattgtaaattgttgtacagatgtcatatttcaattactaagtttcagcagcttattcttgtacaaatgtttaaaatatggcttttctaattggatattgtattttttttaagtcttcttgaaggcactctaattgctgctaaatgatgttgcttctttgctaaaaaattaaatgacctagaaggtgcaagttgactgtacatcatagatattaaaaagcagacagtcattaacaatcaagatgtaaaagtgatccatgttggacataattgagtttttaaatcagtttattgggttctagggctgtagaacacatagatactagatttttaatttgttcatggttattctacatttctagaaagttcttatcagcaagatggtcccataagcaaatttcttgtggtttgtacagatttgttaaaatgtgaacgttttctaactgcctcgtagggtagaaaccaatatttttcaggatgctgtatttcactcctgtaaggactttttctttattgtcacattcataatgctgatacttacatgtaagttgttcatgttgcagaaaaaggttatacgtaccacggattctctttaatattgtacagttaaactgtatttctgatgttgcaagccattttgttttttcattgtacatagacacattgtctctttaaaatgctgctgaaattgtagagagtatagccaaaacagtaataaacaatgacagttaaaatgtaaagactatgaaaattacattggaagggagctttcaagatggtaggatattgactaactgagctccttcacttaaaaatcagctgaataaattccttaagtatacttcaagacaagtgtaaattgtttcaagctgttaaagttaaacctaataaccattatcaaggcaactcctgggtaagtaacacttagaaccatcaagagtggtttaaggggctggctatacccattcctctgtagagcacagagaaatcctattaaaaaaaaaatactacatggtaatgaaatcttagcattgattgagtgctttacgtgctgcctgcaagttttcagttttgttgttagagttttcgtctttatgaatgataaagtcctatgttcataaagtaacatttaaattcctgaactaaaaggaaatgcctgttgtgcttaaaattttggggagatacgaagtgaatgtgtaaatctaactttgaggttcagtaagttaagtagtatagacctagagatcactgctttaccattttactttcaaatgaatgagagcgactgctagtggcagaacgcagaaaaggggaaaaacaagccatgaaatgaagttgctttcctg

SEQ ID NO: 14 - DNA, 3143 bp, Homo sapiens
acggctccgcccttctcaagatggcgctgcactcaatgcggaaagcgcgtgagcgctggagcttcatccgggcacttcataagggatccgcagctgctcccgctctccagaaagacagcaagaagcgagtattttccggcattcaacctacaggaatcctccacctgggcaattacctgggagccattgagagctgggtgaggttacaggatgaatatgactctgtattatacagcattgttgacctccactccattactgtcccccaagacccagctgtccttcggcagagcatcctggacatgactgctgttcttcttgcctgtggcataaacccggaaaaaagcatccttttccaacaactgatgcagaggttaccccaccgcctcagccgccacccacagcccgccgccgccgcctcccgggcgacgccgggggccgacgcactgcagaggtgccggcaggttccgcccgcggaagtgtcctcggccggcgcagcccgcgctccgcccgcgctccgaccccggcccggctggcaccccctcgacgcctccgccgccgcgctcctttcctcctcctctcctctggcgcgcccgctcgctccctcgcttctccccctttccctcctccctgtcccctctccttccctcacctctttcctccccacctcccctcttctcggtttcctcccccatccccttgactctcccctcccagccctcgctctctcgctcgccctcagcgcggcccccgccatgacggaggcgggtgccggtgccgttgccgccgctgccgtcgcagggggggagtcgggttcccagaaagtagcttgatgagtgtccaaagtagcagtggaagtttggaggggccgccatcttggtcccagctctccacgtctccaaccccgggctcggcggcggcggccaggtccctgctgaatcacacgccgccatccgggaggcccagggaaggtgcaatggatgagcttcatagtctggatccaagaaggcaagagttattggaagctagatttactggagttgcaagtgggagcactggaagtacgggcagttgcagtgttggagctaaagcctcaacaaataacgaaagctctaatcacagttttggaagcttgggatctttaagtgacaaagaatcagagacaccggagaagaaacaatcggaatcatccaggggaagaaagagaaaagcagaaaaccagaatgaaagtagtcagggaaaaagtattgggggacgtggccacaaaattagcgactattttgaataccagggtggaaatggctcaagtccagtaagaggcatacctcctgcaatccgttctcctcaaaattcacattcacattccactccttcctcatctgttcgaccgaatagcccttctcctactgcattagcatttggggaccaccctattgtacaaccaaagcaattatcctttaaaattattcagactgatctcacaatgctgaaattagcagcattagaaagtaataaaatccaggacctggaaaagaaggagggacgtatagatgatttgctcagggctaactgtgatctcagacggcaaatagatgaacaacaaaaattacttgaaaaatacaaagaacgattaaataagtgcatatcaatgagcaagaaacttcttattgaaaagagtacacaagaaaagctgtcaagcagagagaagagtatgcaagatcgattacgcctcgggcactttacaacagttagacatggcgcttcatttactgaacaatggacagatggttttgcatttcagaatcttgtgaagcaacaagaatgggtgaatcagcaaagggaagatattgaaaggcaaaggaaacttctagccaaacgcaaacctcccacagctaataattctcaggcaccctctaccaattctgaaccaaaacaaaggaaaaacaaagcagtcaatggagcagagaatgatccctttgttagaccaaatttaccacaactgttgactttggcagaatatcatgaacaggaagaaattttcaaacttagactaggacatctcaaaaagagataacagtatagcaacaactctgccactgaaatcctgttctctgaccgatattggcacctgcaaagagaaacaaccagtaacaggcagcagcagcatcagtattaatcttccatgatgaaatctttacaggtcaagaacaagtacacagctcttttctcactccttcacagtggaccatgcaactagttgaaatggaagacaatggattgtctacaagccttttgaacagtggagaatgcagggcgttggctttaggaagaggcagaaatccaggcagaacttgaacgtttggaaagagtcagaaatcttcacatacgtgagctgaaaagaataaacaatgaagataattcacagttcaaagatcacccaacattaaatgaaagatatttattacttcatctgcttggtagaggtggctttagtgaagtgtataaggcttttgacctttatgaacaaagatatgctgctgtgaagatacatcagcttaataaaagctggagagatgagaagaaagaaaactaccacaaacatgcctgcagagagtatagaatacacaaagaactggatcaccccagaatagttaaactctatgattatttctccttggatacagatacgttttgtacagtgttagaatactgtgaaggcaatgacttggatttctatctgaagcaacacaagttaatgtcagagaaagaagctcggtctattgtaatgcagattgtaaatgcactaagatatctcaatgagatcaaaccccctattatacattatgatcttaagccaggaaacatcctactggtagatggaacagcatgtggtgaaatcaaaatcactgattttggtctgtccaagattatggatgatgatagctatggtgtagatggaatggatctaacttcccagggggcaggcacttactggtatttacctcctgagtgttttgtagttggaaaagagccaccaaagatttccaacaaggttgatgtatggtcggttggagtcatcttctttcagtgtctttatggtagaaagccatttggtcacaatcaatctcaacaagacattcttc

SEQ ID NO: 15 - DNA, 2603 bp, Homo sapiens
aagagaagagagggagaaggcacactgaggaatgccaaggactgccagcagcaccagaagctaggagagaggcacagaacagactcctagcttctcctaggctccctctgagcctccaggaagaaccaatcccggtgacatcttgattttggacttctggcatcagaactgtgcaatggatgagcttcatagtctggatccaagaaggcaagagttattggaagctagatttactggagttgcaagtgggagcactggaagtacgggcagttgcagtgttggagctaaagcctcaacaaataacgaaagctctaatcacagttttggaagcttgggatctttaagtgacaaagaatcagagacaccggagaagaaacaatcggaatcatccaggggaagaaagagaaaagcagaaaaccagaatgaaagtagtcagggaaaaagtattgggggacgtggccacaaaattagcgactattttgaataccagggtggaaatggctcaagtccagtaagaggcatacctcctgcaatccgttctcctcaaaattcacattcacattccactccttcctcatctgttcgaccgaatagcccttctcctactgcattagcatttggggaccaccctattgtacaaccaaagcaattatcctttaaaattattcagactgatctcacaatgctgaaattagcagcattagaaagtaataaaatccaggacctggaaaagaaggagggacgtatagatgatttgctcagggctaactgtgatctcagacggcaaatagatgaacaacaaaaattacttgaaaaatacaaagaacgattaaataagtgcatatcaatgagcaagaaacttcttattgaaaagagtacacaagaaaagctgtcaagcagagagaagagtatgcaagatcgattacgcctcgggcactttacaacagttagacatggcgcttcatttactgaacaatggacagatggttttgcatttcagaatcttgtgaagcaacaagaatgggtgaatcagcaaagggaagatattgaaaggcaaaggaaacttctagccaaacgcaaacctcccacagctaataattctcaggcaccctctaccaattctgaaccaaaacaaaggaaaaacaaagcagtcaatggagcagagaatgatccctttgttagaccaaatttaccacaactgttgactttggcagaatatcatgaacaggaagaaattttcaaacttagactaggacatctcaaaaaggaagaggcagaaatccaggcagaacttgaacgtttggaaagagtcagaaatcttcacatacgtgagctgaaaagaataaacaatgaagataattcacagttcaaagatcacccaacattaaatgaaagatatttattacttcatctgcttggtagaggtggctttagtgaagtgtataaggcttttgacctttatgaacaaagatatgctgctgtgaagatacatcagcttaataaaagctggagagatgagaagaaagaaaactaccacaaacatgcctgcagagagtatagaatacacaaagaactggatcaccccagaatagttaaactctatgattatttctccttggatacagatacgttttgtacagtgttagaatactgtgaaggcaatgacttggatttctatctgaagcaacacaagttaatgtcagagaaagaagctcggtctattgtaatgcagattgtaaatgcactaagatatctcaatgagatcaaaccccctattatacattatgatcttaagccaggaaacatcctactggtagatggaacagcatgtggtgaaatcaaaatcactgattttggtctgtccaagattatggatgatgatagctatggtgtagatggaatggatctaacttcccagggggcaggcacttactggtatttacctcctgagtgttttgtagttggaaaagagccaccaaagatttccaacaaggttgatgtatggtcggttggagtcatcttctttcagtgtctttatggtagaaagccatttggtcacaatcaatctcaacaagacattcttcaagaaaatacaatattaaaagccacagaagtccagttccctgtaaaaccggttgtaagcagtgaagccaaggcatttataagacgctgtttggcatatcgaaaagaagatcgatttgatgtgcaccagctggcaaatgacccataccttctcccacacatgagaagatcaaattcttcaggaaacctacacatggctgggctgacagcatcccctacacccccttcttcaagcataattacttactgactttcctccaagattggcatgatatctttgaatttgcttccagatgcacacttaagtttgagagcatttgagtgtttgttttctttttcttttttttttttttttttttacacaagacgtggttaagaactgtttgtgaactgaagttcctcatagtgtcatttgtatgagagaggatcatggacaatgaataaatgcacacttctgactataattttgagcagtgaaggaaggatgactgcctgttacacagaaacaggaataccatgtt

SEQ ID NO: 16 - DNA, 4071 bp, Homo sapiens
ccacgcgtccgcgggttcccagaaagtagcttgatgagtgtccaaagtagcagtggaagtttggaggggccgccatcttggtcccagctctccacgtctccaaccccgggctcggcggcggcggccaggtccctgctgaatcacacgccgccatccgggaggcccagggaaggtgcaatggatgagcttcatagtctggatccaagaaggcaagagttattggaagctagatttactggagttgcaagtgggagcactggaagtacgggcagttgcagtgttggagctaaagcctcaacaaataacgaaagctctaatcacagttttggaagcttgggatctttaagtgacaaagaatcagagacaccggagaagaaacaatcggaatcatccaggggaagaaagagaaaagcagaaaaccagaatgaaagtagtcagggaaaaagtattgggggacgtggccacaaaattagcgactattttgaataccagggtggaaatggctcaagtccagtaagaggcatacctcctgcaatccgttctcctcaaaattcacattcacattccactccttcctcatctgttcgaccgaatagcccttctcctactgcattagcatttggggaccaccctattgtacaaccaaagcaattatcctttaaaattattcagactgatctcacaatgctgaaattagcagcattagaaagtaataaaatccaggacctggaaaagaaggagggacgtatagatgatttgctcagggctaactgtgatctcagacggcaaatagatgaacaacaaaaattacttgaaaaatacaaagaacgattaaataagtgcatatcaatgagcaagaaacttcttattgaaaagagtacacaagaaaagctgtcaagcagagagaagagtatgcaagatcgattacgccttgggcactttacaacagttagacatggcgcttcatttactgaacaatggacagatggttttgcatttcagaatcttgtgaagcaacaagaatgggtgaatcagcaaagggaagatattgaaaggcaaaggaaacttctagccaaacgcaaacctcccacagctaataattctcaggcaccctctaccaattctgaaccaaaacaaaggaaaaacaaagcagtcaatggagcagagaatgatccctttgttagaccaaatttaccacaactgttgactttggcagaatatcatgaacaggaagaaattttcaaacttagactaggacatctcaaaaaggaagaggcagaaatccaggcagaacttgaacgtttggaaagagtcagaaatcttcacatacgtgagctgaaaagaataaacaatgaagataattcacagttcaaagatcacccaacattaaatgaaagatatttattacttcatctgcttggtagaggtggctttagtgaagtgtataaggcttttgacctttatgaacaaagatatgctgctgtgaagatacatcagcttaataaaagctggagagatgagaagaaagaaaactaccacaaacatgcctgcagagagtatagaatacacaaagaactggatcaccccagaatagttaaactctatgattatttctccttggatacagatacgttttgtacagtgttagaatactgtgaaggcaatgacttggatttctatctgaagcaacacaagttaatgtcagagaaagaagctcggtctattgtaatgcagattgtaaatgcactaagatatctcaatgagatcaaaccccctattatacattatgatcttaagccaggaaacatcctactggtagatggaacagcatgtggtgaaatcaaaatcactgattttggtctgtccaagattatggatgatgatagctatggtgtagatggaatggatctaacttcccagggggcaggcacttactggtatttacctcctgagtgttttgtagttggaaaagagccaccaaagatttccaacaaggttgatgtatggtcggttggagtcatcttctttcagtgtctttatggtagaaagccatttggtcacaatcaatctcaacaagacattcttcaagaaaatacaatattaaaagccacagaagtccagttccctgtaaaaccggttgtaagcagtgaagccaaggcatttataagacgctgtttggcatatcgaaaagaagatcgatttgatgtgcaccagctggcaaatgacccataccttctcccacacatgagaagatcaaattcttcaggaaacctacacatggctgggctgacagcatcccctacacccccttcttcaagcataattacttactgactttcctccaagattggcatgatatctttgaatttgcttccagatgcacacttaagtttgagagcatttgagtgtttgttttctttttctttttttttttttttttttttacacaagacgtggttaagaactgtttgtgaactgaagttcctcatagtgtcatttgtatgagagaggatcatggacaatgaataaatgcacacttctgactataattttgagcagtgaaggaaggatgactgcctgttacacagaaacaggaataccatgttaagatagaggaaaaaaattttgtttatttgggggaacactgtaaataacgtttataatacttaaatacatttggttgttactagagagttctaatatgaagggtagtttttcattatttaaaaacacatggaaaaatatgagacatatttctaacatacgaactatagtgcctggatacattcttcagcatttggcagttaatctgctgaaaccaaagtaagaactgaatgacagtgacagttgtgttttatagtaatagaatgtgagagttagaatctttggacaaagttaggctttgtcatttgcctattcagacttttaccaagttgtacctcgagatcacatgtccgttttctttcactggttatattaaagggagagctattatttctaaatactttacacctttgacaaaatgagctgcttgtgttgaaatcagttgaattcactaaattataatattgccagtgttttcaacacgttagaattgataacaggtatttttcttttgttaccaggccttgttcatcaaaacaggtgacagtgagtaaccaaatgcagaccagttctatgcaggataatgataaattcccttctagctctattgtaaattgttgtacagatgtcatatttcaattactaagtttcagcagcttattcttgtacaaatgtttaaaatatggcttttctaattggatattgtattttttttaagtcttcttgaaggcactctaattgctgctaaatgatgttgcttctttgctaaaaaattaaatgacctagaaggtgcaagttgactgtacatcatagatattaaaaagcagacagtcattaacaatcaagatgtaaaagtgatccatgttggacataattgagtttttaaatcagtttattgggttctagggctgtagaacacatagatactagatttttaatttgttcatggttattctacatttctagaaagttcttatcagcaagatggtcccataagcaaatttcttgtggtttgtacagatttgttaaaatgtgaacgttttctaactgcctcgtagggtagaaaccaatatttttcaggatgctgtatttcactcctgtaaggactttttctttattgtcacattcataatgctgatacttacatgtaagttgttcatgttgcagaaaaaggttatacgtaccacggattctctttaatattgtacagttaaactgtatttctgatgttgcaagccattttgttttttcattgtacatagacacattgtctctttaaaatgctgctgaaattgtagagagtatagccaaaacagtaataaacaatgacagttaaaatgtaaagactatgaaaattacattggaagggagctttcaagatggtaggatattgactaactgagctccttcacttaaaaatcagctgaataaattccttaagtatacttcaaaaaaaaaaaaaaaaaa

SEQ ID NO: 17 - protein, 766 aa, Homo sapiens
MSVQSSSGSLEGPPSWSQLSTSPTPGSAAAARSLLNHTPPSGRPREGAMDELHSLDPRRQELLEARFTGVASGSTGSTGSCSVGAKASTNNESSNHSFGSLGSLSDKESETPEKKQSESSRGRKRKAENQNESSQGKSIGGRGHKISDYFEYQGGNGSSPVRGIPPAIRSPQNSHSHSTPSSSVRPNSPSPTALAFGDHPIVQPKQLSFKIIQTDLTMLKLAALESNKIQDLEKKEGRIDDLLRANCDLRRQIDEQQKLLEKYKERLNKCISMSKKLLIEKSTQEKLSSREKSMQDRLRLGHFTTVRHGASFTEQWTDGFAFQNLVKQQEWVNQQREDIERQRKLLAKRKPPTANNSQAPSTNSEPKQRKNKAVNGAENDPFVRPNLPQLLTLAEYHEQEEIFKLRLGHLKKEEAEIQAELERLERVRNLHIRELKRINNEDNSQFKDHPTLNERYLLLHLLGRGGFSEVYKAFDLYEQRYAAVKIHQLNKSWRDEKKENYHKHACREYRIHKELDHPRIVKLYDYFSLDTDTFCTVLEYCEGNDLDFYLKQHKLMSEKEARSIVMQIVNALRYLNEIKPPIIHYDLKPGNILLVDGTACGEIKITDFGLSKIMDDDSYGVDGMDLTSQGAGTYWYLPPECFVVGKEPPKISNKVDVWSVGVIFFQCLYGRKPFGHNQSQQDILQENTILKATEVQFPVKPVVSSEAKAFIRRCLAYRKEDRFDVHQLANDPYLLPHMRRSNSSGNLHMAGLTASPTPPSSSIITY

SEQ ID NO: 18 - DNA, 2846 bp, Homo sapiens
acggctccgcccttctcaagatggcgctgcactcaatgcggaaagcgcgtgagcgctggagcttcatccgggcacttcataagggatccgcagctgctcccgctctccagaaagacagcaagaagcgagtattttccggcattcaacctacaggaatcctccacctgggcaattacctgggagccattgagagctgggtgaggttacaggatgaatatgactctgtattatacagcattgttgacctccactccattactgtcccccaagacccagctgtccttcggcagagcatcctggacatgactgctgttcttcttgcctgtggcataaacccggaaaaaagcatccttttccaacaatctcaggtgtctgaacacacacaattaagttggatcctttcctgcatggtcagactacctcgattacaacatttacatcagtggaaggcaaagactaccaagcagaagcacgatggcacggtgggcctgctcacatacccagtactccaggcagccgacattctgttgtacaagtccacacacgttcctgttggggaggatcaagtccagcacatggaactagttcaggatctagcacaaggtttcaacaagaagtatggggagttctttccagtgcccgagtccattctcacatccatgaagaaggtaaaatccctacgtgatccttctgccaaaatgtcgaaatcagaccctgacaaactggccaccgtccgaataacagacagcccagaggagatagtgcagaaattccgcaaggctgtgacagacttcacctcggaggtcacctatgacccggctggccgcgctggcgtgtccaacatagtggcggtgcatgccgcggtgacggggctctccgtggaggaagtggtgcgccgcagcgcgggcatgaacactgctcgctacaagctggccgtggcagatgctgtgattgagaagtttgccccaattaagcgtgaaattgaaaaactgaagctggacaaggaccatttagagaaggttttacaaattggatcagcaaaagccaaagaattagcatacactgtgtgccaggaggtgaagaaattggtgggttttctataggaagtttcaacgaatcacagcaaggcttttgtgccttgcactccatgcattctgataacggcagctttcctaaaaagaaaaagttatagttttgggacatttaatttggtatagctgattattggctttatttgatgaatattgctttgtagctttgaaatacgacagtgttccaaatcccatcaacaaaatgctgtgaacaacaacaacaaaaaataaatcaagaaggcatagctgtctgaatccccaattattgaggcacactccttggcctgcagaaatgtgattgaagtaaggagtaatttgggaaatggagtatcatttgtgcttctctctggagtacttactgtaacagatgcacacgttatctacttcaacccttttataaagcaatatatagaggtcttagatgtataatccttgagatgccatttgatcagatgccaatttgtattcagagctcataaaaacaagtccattcttatagtttgtttgtcactgagacggtgcctgatttaatatatttaagctgcttaacttgttttccaagagataacaccaactgttccagcaataatttgttttttaattcagagatatgggatatgatcttctaaggaggttgcattattttgacctgatttatttattgtacaagagcccaagtccctgaattatattcttaataagtgctttcttgcattcatttcagtttagtctcaccaaccccctatgaattaggagaattattgtcattttacacatgaggaaagtgaggctgagagaatccaattagcttgtacgatatcactccataagagaagcaaatctgagagtaaaacccttaccccttattcttaagaatagtgcttgtttattcagtacaaaaaaaatgctgaaaggcagcgttttttagactctaaacattctgattttgaaggtgggtgttggaacgactgatgatgttttttatatcatcaattcagccaatggatgcgaacttaaaatctggattcacagaaccgtggtcacatttccccatcaaaatccccaaggcgggtcccaagttctctcctctacgctcattgcagaaatactttgaaataggttctgccagtctacaatagcagtgaagactgacaaatcagatattcccaatgactgacagcttctcatcttgcctctacctcagttaagtaatgtcaccctgaaacctagcttttctgcacttccatttctgacacctgaaaatgaaaatgataatcctaacttatacaccaagacctgttagcaagatcgattttgtaacagaaattgcttataagttttttatcagtaaggaccatgatcaccatttgtacatacataactaggttgttgagcaaagcatttttgctcatgtttcttaaggaagtagagtagtccttgtgtcagaacacatgttaatccacaaaacgccgcatcccagattccaaattaaaacatcgtttttaggattcttggagctagcctggatcatgggtaaaggaaacattttgccttttgtatcttatactggaatgggatgtctgtaagtcctagaacctctttgagcatatttcttacaagcctctgttttttcccctttaaaggaaactttgaaaggattgtgaatactggaaaatgacaaaactaaaggtagatctatcaagccaaaaaaaaaaaaaaaaaaaaaaaaaaaaaaaaaaaaaaaaaaaaaaaaaa

SEQ ID NO: 19 - protein, 360 aa, Homo sapiens
MALHSMRKARERWSFIRALHKGSAAAPALQKDSKKRVFSGIQPTGILHLGNYLGAIESWVRLQDEYDSVLYSIVDLHSITVPQDPAVLRQSILDMTAVLLACGINPEKSILFQQSQVSEHTQLSWILSCMVRLPRLQHLHQWKAKTTKQKHDGTVGLLTYPVLQAADILLYKSTHVPVGEDQVQHMELVQDLAQGFNKKYGEFFPVPESILTSMKKVKSLRDPSAKMSKSDPDKLATVRITDSPEEIVQKFRKAVTDFTSEVTYDPAGRAGVSNIVAVHAAVTGLSVEEVVRRSAGMNTARYKLAVADAVIEKFAPIKREIEKLKLDKDHLEKVLQIGSAKAKELAYTVCQEVKKLVGFL

SEQ ID NO: 20 - DNA, 2846 bp, Homo sapiens; identical to SEQ ID NO: 18

SEQ ID NO: 21 - protein, 220 aa, Homo sapiens
MALHSMRKARERWSFIRALHKGSAAAPALQKDSKKRVFSGIQPTGILHLGNYLGAIESWVRLQDEYDSVLYSIVDLHSITVPQDPAVLRQSILDMTAVLLACGINPEKSILFQQSQVSEHTQLSWILSCMVRLPRLQHLHQWKAKTTKQKHDGTVGLLTYPVLQAADILLYKSTHVPVGEDQVQHMELVQDLAQGFNKKYGEFFPVPESILSMCVLVFLT

SEQ ID NO: 22 - DNA, 101 bp, Homo sapiens
acactcgttatctgtctgggagatttttaggtgaattaacagaagcagaagaactgtattaaactttctcataaccccaaacaaaacaatttcttccatca

SEQ ID NO: 23 - DNA, 101 bp, Homo sapiens
gccccaccccgctcctgtccccacctgctcggcaagaactgcagtccgcctgatagcggctgcgctgcgcagcctggaggcccaagccgcgcccagcaagc

SEQ ID NO: 24 - DNA, 101 bp, Homo sapiens
gagtatcatttgtgcttctctctggagtacttactgtaacagatgcacactttatctacttcaacccttttataaagcaatatatagaggtcttagatgta

SEQ ID NO: 25 - DNA, 101 bp, Homo sapiens
tattgaggcacactccttggcctgcagaaatgtgattgaagtaaggagtagtttgggaaatggagtatcatttgtgcttctctctggagtacttactgtaa

SEQ ID NO: 26 - DNA, 121 bp, Homo sapiens
ctttaaaggaaactttgaaaggattgtgaatactggaaaatgacaaaactgaaggtagatctatcaagccaattgtctgtttatctgtttgtgtggttttttgagttataaaagtatctta

SEQ ID NO: 27 - DNA, 3111 bp, Homo sapiens
cattttgtatgaaaacatttcaaaagtgtattgtaggttttttcttcaaagatacattgaataatatatctttccccgaggagtcatggttaccattattaaaaacttattaaaatacgttaaatatactgagctgaatatattcctcctcttagaagatggtgagctttgtagtcatactttccccaacaccaaaatgcttactgtgaaaaagtacaaaagtagacagaactggttcatttttaatacatcctgtgtcttttctgttaactgttccttctggctgttaaaagcataacaattgctgacaataagctgtgtaatttgttaaaatccaatttacttttaaaagaggtgcctactctgcataagagactattctaggtgctgggggagatgttagaaatataaactatagtccttgtccaagaagcaaggctggctgagtgacacctgagagttaccaggtcaccgccacggtgcaaaacacagtttattacttctaacaaagtctaaaaattagcaaatattttcaattttaaaaatcaggatactaaagttataaaacttgtggtcttaaagtcccaccttttttagtgggactatgtcttggaaatacctcccacggaaatattattggtcataggagtctgcagatacgactaagaactacttcttgaagaaataaagtaggtacaccctttgacagcttttggtgcaccatagtcttattgctaggttttatcttgctatctagatgactaaagatgtcagaaagctaatcttgctaattgctagggtcatgtaatctcattaataaaatatatgtaaaacactgtactataatgctttgctctatgtatgagtaaaacatgtagggcatttattaaactgcattttacaaggcataacatatatcccccttcccctggcaaggtttgtttccagggtctcagtaatatcacattctttgggttctacaacacctcttggctcctttatttccatcatctggctactttcactccacaaactctatctgatggtctcaaggatttccttggtttcaattaccatctgtttggtagttcaaatctcttctgagctccagacccatgtatctatttaatgggcatcacattttggaagtactacaagcacctcaaatttaacagccaaaaccaaactgatcagctttgttgaagactataacttgatttcctagttttttttttgccttcatccctttcctgctcacttctaaattacaccaattatacttgaacttcaccagtactttgtatacctacaagattatcctatatggttttaatttactgttttgtcttaccctggtagatttcagctcctttataggcatctcttatctcctacctctccttggtaattttcagtagctggatgaattataaacaaaacacataaaggaattgtcatgaatttcttccagttatatttttactgaaacactcgttatctgtctgggagatttttaggtgaattaacagaagcagaraaactgtattaaactttctcataaccccaaacaaaacaatttcttccatcaggtataaccttcctgcagccttccctagactaggttgaaacaccacagtcataaccactcctccttaaaacttgcggtgcttgcttctttaacacctattaagtgtacatcatttatttatccgctactctattagactgtacacaacttgaagacaagatatgtctttctctgtaccttcagtgcccagcacattacggtagggttcaacaaagtttacaggacgaatgaaataaggccacataagtccagtgcggtggcacatgcctgtaatcccagcactttaggaggccgaggcagatggcttggcttgagctcaggagtttgagagagcctgggcaacatggtgaaaccctgtctccaccaaaatacaaaaattagccgggcgtggtggcgcacccttgtggtcccagctactcaggaggctgaggcaggagaatagcttgagtctgggaggtggaggttgcagtgagccgagatcgcgccattgcactccagcctgggcgagagtgagaccttgtctcaaagaaaaaaaagggaaatgaggccacacatgtctaaaaagaccacttatattaccctctaagagaactgggagtttctaaacaaactttttaaaggttgccttcacatagctaagatcagaaatgcagcctacttgactttcttccagtctaaagcgttgctactaataacccccaaggaaattctccttccaggaaggctgagcagacaagggatccagggaaaaacactaaagccccaccccgctcctgtccccacctgctcggcaagaactgcagtccgccygatagcggctgcgctgcgcagcctggaggcccaagccgcgcccagcaagcaggagtcgcgagactgggattggctctctgaacagacgtcattccaaacaagacggctccgcccttctcaagatggcgctgcactcaatgcggaaagcgcgtgagcgctggagcttcatccgggcacttcataagggatccgcagctgctcccgctctccaggtaaccaaagacggcccttccctccgcggcttcccatcccgcgaggttcttctcatcccactgccctctatttatttctctcctcccgcttcttagggaaagtacatgccttccctcgcctaaggtctactcgtctatgactgtcggcctgctcagagcgtagtgacgttgcaaggatacgtgatgacgtaaaggtttcttggtggaaaaagcgcgccgctttctgacctcttgccgccacctccagttctgggagcggagcgccgccgctgttgccgggcaacgcggtgagcctaccccgcgtgtgatgttttcagagacgggttgttttagagactgctcttcttgtggtcttattactgtttttaccctccttaccctaacaacacgctaaggggctatcggagagagtagagaagttttgttaggcattgggcagcttgggtcggggcagcaggttggcagtgtggtacttgagcaagtgtcagtgcatcttccatt

SEQ ID NO: 28 - DNA, 3998 bp, Homo sapiens
agaatattgaattactccctatgtgacagggaggaaaaactcttgcctgaagaactttctgctgcctttgatttgaagagtggggtggggtgtctttcaagtatgagctgtagttctgaggtaaagagcatctggtcagggctgggaataatatgtgctgactgggtgagggaatgaggagtagttttaaaacacaattgtgcctagagcatatgctatttaaaatcccattcctccctcccagcaagatcctgtcatgctggtgttgatggctgtattcccctgctgtggaaaaaacacaactagagtagagaaacatctctttggcttttgtctgatccatagataaagacttaggtctaaacattccctctatagttggtgaacatttgttgaataccaacagtgaaatattcacaggaaatgcagctgcttgcaatatcatttctgtctctaagaaagagccttgctgttgtttttctgtctgtcttttattaaaggtccacacacgttcctgttggggaggatcaagtccagcacatggaactagttcaggatctagcacaaggtttcaacaagaagtatggggagttctttccagtgcccgagtccattctcagtaagtaagaaacttataattgttacatcagggtatattctaaagagaggattggacaatagataggcttggaactttcttgggactaacctcagctttcttgtagacaggcttcaggatctgtaactagagtcctcattgttttctctagtgtaggactagaaagtagactacgttggattcctgaaaaagatgttggattattgaaaaggataactaaaaatattttaaaagtatggaagagaccaaaaatttaaaataatatttataaagtagtatataatttatgaagtatgaacagatgcttcttgacttataattgggttacatcctgataaagccattgtaagttggaaacactgttaatcaaaaatgcatttaacacacataacctactgaacatcacagcttagcctagcccaccttcagcgtgctcagaacacttacattagtctataattgggcagaatcatctaacacaaagcctattttataataaagtattgaatatctcatgtaatttattgaatactatactgaaagtgaaaaacagaatggttgtgtgggtatttcaagtacagtttctactgaatggatatcacatttgcaccactgtaaagttgaaaaatcataattcaaaccattgcaagttgggaactgtctgtgtgtacatcttggtgatctgtttgttttgtttttgttttgggtatgtgtgtgttggtgtttttaacctagcatccatgaagaaggtaaaatccctacgtgatccttctgccaaaatgtcgaaatcagaccctgacaaactggccaccgtccgaataacagacagcccagaggagatagtgcagaaattccgcaaggctgtgacagacttcacctcggaggtcacctatgacccggctggccgcgctggcgtgtccaacatagtggcggtgcatgccgcggtgacggggctctccgtggaggaagtggtgcgccgcagcgcgggcatgaacactgctcgctacaagctggccgtggcagatgctgtgattgagaagtttgccccaattaagcgtgaaattgaaaaactgaagctggacaaggaccatttagagaaggttttacaaattggatcagcaaaagccaaagaattagcatacactgtgtgccaggaggtgaagaaattggtgggttttctataggaagtttcaacgaatcacagcaaggcttttgtgccttgcactccatgcattctgataacggcagctttcctaaaaagaaaaagttatagttttgggacatttaatttggtatagctgattattggctttatttgatgaatattgctttgtagctttgaaatacgacagtgttccaaatcccatcaacaaaatgctgtgaacaacaacaacaaaaaataaatcaagaaggcatagctgtctgaatccccaattattgaggcacactccttggcctgcagaaatgtgattgaagtaaggagtartttgggaaatggagtatcatttgtgcttctctctggagtacttactgtaacagatgcacackttatctacttcaacccttttataaagcaatatatagaggtcttagatgtataatccttgagatgccatttgatcagatgccaatttgtattcagagctcataaaaacaagtccattcttatagtttgtttgtcactgagacggtgcctgatttaatatatttaagctgcttaacttgttttccaagagataacaccaactgttccagcaataatttgttttttaattcagagatatgggatatgatcttctaaggaggttgcattattttgacctgatttatttattgtacaagagcccaagtccctgaattatattcttaataagtgctttcttgcattcatttcagtttagtctcaccaaccccctatgaattaggagaattattgtcattttacacatgaggaaagtgaggctgagagaatccaattagcttgtacgatatcactccataagagaagcaaatctgagagtaaaacccttaccccttattcttaagaatagtgcttgtttattcagtacaaaaaaaatgctgaaaggcagcgttttttagactctaaacattctgattttgaaggtgggtgttggaacgactgatgatgttttttatatcatcaattcagccaatggatgcgaacttaaaatctggattcacagaaccgtggtcacatttccccatcaaaatccccaaggcgggtcccaagttctctcctctacgctcattgcagaaatactttgaaataggttctgccagtctacaatagcagtgaagactgacaaatcagatattcccaatgactgacagcttctcatcttgcctctacctcagttaagtaatgtcaccctgaaacctagcttttctgcacttccatttctgacacctgaaaatgaaaatgataatcctaacttatacaccaagacctgttagcaagatcgattttgtaacagaaattgcttataagttttttatcagtaaggaccatgatcaccatttgtacatacataactaggttgttgagcaaagcatttttgctcatgtttcttaaggaagtagagtagtccttgtgtcagaacacatgttaatccacaaaacgccccatcccagattccaaattaaaacatcgtttttaggattcttggagctagcctggatcatgggtaaaggaaacattttgccttttgtatcttatactggaatgggatgtctgtaagtcctagaacctctttgagcatatttcttacaagcctctgttttttcccctttaaaggaaactttgaaaggattgtgaatactggaaaatgacaaaactraaggtagatctatcaagccaattgtctgtttatctgtttgtgtggtttttacccccttgcaatacctttcctccaaaaaattaaggcactatggaaagaatctcagaggagaaaaacagataacttgtgataacttccagggaccgaagtctatgcattggtgagggtggacttgtttgcaacctgttgttattttttttaagtgacccaactgttcaagtccaaacttggcccataattattaagagaatcttatccggttaatcagtattaatcaggattcttcagagaaacaaaaccaataggatatatatctatatattagagaatttattatggggattagctcacccaattatgaaggctgagaagttccatgataggctatgtgcaagctggacccaagagagatgatggtgtgatacagtccaagtccttaggctggagaaccaggggaaccaatgatgtaactgtcagtccaaggctgaaggcttgagaacctgggggccactgtaagtccc

SEQ ID NO: 29 - DNA, 51 bp, Homo sapiens
aaataatttgaacattcctaactcatgcttattggaattttatgactttct

SEQ ID NO: 30 - DNA, 5325 bp, Homo sapiens
actttcggtcctgggggagctaggccggcggcagtggtggtggcggcggcgcaagggtgagggcggccccagaaccccaggtaggtagagcaagaagatggtgtttctgcccctcaaatggtcccttgcaatcatgtcatttctactttcctcactgttggctctcttaactgtgtccactccttcatggtgtcagagcactgaagcatctccaaaacgtagtgatgggacaccatttccttggaataaaatacgacttcctgagtacgtcatcccagttcattatgatctcttgatccatgcaaaccttaccacgctgaccttctggggaaccacgaaagtagaaatcacagccagtcagcccaccagcaccatcatcctgcatagtcaccacctgcagatatctagggccaccctcaggaagggagctggagagaggctatcggaagaacccctgcaggtcctggaacacccccctcaggagcaaattgcactgctggctcccgagcccctccttgtcgggctcccgtacacagttgtcattcactatgctggcaatctttcggagactttccacggattttacaaaagcacctacagaaccaaggaaggggaactgaggatactagcatcaacacaatttgaacccactgcagctagaatggcctttccctgctttgatgaacctgccttcaaagcaagtttctcaatcaaaattagaagagagccaaggcacctagccatctccaatatgccattggtgaaatctgtgactgttgctgaaggactcatagaagaccattttgatgtcactgtgaagatgagcacctatctggtggccttcatcatttcagattttgagtctgtcagcaagataaccaagagtggagtcaaggtttctgtttatgctgtgccagacaagataaatcaagcagattatgcactggatgctgcggtgactcttctagaattttatgaggattatttcagcataccgtatcccctacccaaacaagatcttgctgctattcccgactttcagtctggtgctatggaaaactggggactgacaacatatagagaatctgctctgttgtttgatgcagaaaagtcttctgcatcaagtaagcttggcatcacagtgactgtggcccatgaactggcccaccagtggtttgggaacctggtcactatggaatggtggaatgatctttggctaaatgaaggatttgccaaatttatggagtttgtgtctgtcagtgtgacccatcctgaactgaaagttggagattatttctttggcaaatgttttgacgcaatggaggtagatgctttaaattcctcacaccctgtgtctacacctgtggaaaatcctgctcagatccgggagatgtttgatgatgtttcttatgataagggagcttgtattctgaatatgctaagggagtatcttagcgctgacgcatttaaaagtggtattgtacagtatctccagaagcatagctataaaaatacaaaaaacgaggacctgtgggatagtatggcaagtatttgccctacagatggtgtaaaagggatggatggcttttgctctagaagtcaacattcatcttcatcctcacattggcatcaggaaggggtggatgtgaaaaccatgatgaacacttggacactgcagaggggttttcccctaataaccatcacagtgagggggaggaatgtacacatgaagcaagagcactacatgaagggctctgacggcgccccggacactgggtacctgtggcatgttccattgacattcatcaccagcaaatccaacatggtccatcgatttttgctaaaaacaaaaacagatgtgctcatcctcccagaagaggtggaatggatcaaatttaatgtgggcatgaatggctattacattgtgcattacgaggatgatggatgggactctttgactggccttttaaaaggaacacacacagcagtcagcagtaatgatcgggcaagtctcattaacaatgcatttcagctcgtcagcattgggaagctgtccattgaaaaggccttggatttatccctgtacttgaaacatgaaactgaaattatgcccgtgtttcaaggtttgaatgagctgattcctatgtataagttaatggagaaaagagatatgaatgaagtggaaactcaattcaaggccttcctcatcaggctgctaagggacctcattgataagcagacatggacagacgagggctcagtctcagagcaaatgctgcggagtgaactactactcctcgcctgtgtgcacaactatcagccgtgcgtacagagggcagaaggctatttcagaaagtggaaggaatccaatggaaacttgagcctgcctgtcgacgtgaccttggcagtgtttgctgtgggggcccagagcacagaaggctgggattttctttatagtaaatatcagttttctttgtccagtactgagaaaagccaaattgaatttgccctctgcagaacccaaaataaggaaaagcttcaatggctactagatgaaagctttaagggagataaaataaaaactcaggagtttccacaaattcttacactcattggcaggaacccagtaggatacccactggcctggcaatttctgaggaaaaactggaacaaacttgtacaaaagtttgaacttggctcatcttccatagcccacatggtaatgggtacaacaaatcaattctccacaagaacacggcttgaagaggtaaaaggattcttcagctctttgaaagaaaatggttctcagctccgttgtgtccaacagacaattgaaaccattgaagaaaacatcggttggatggataagaattttgataaaatcagagtgtggctgcaaagtgaaaagcttgaacatgatcctgaagctgacgcaacaggatgaaaatccatcagaatctcagactacagcactaaatatgctttgatgctacatcaaacggaatggaagcatagctgacttcgctaaagttacttcatctccatctagcaaatgaggcactgttctcaaccaaaggagatggggatctggtttagggcaatccctttataatttgatgtgctgtggtctccttggtaatgtataatttggtattgcacaggtgattagtcaaggaagtctggaaaagctttggtcccacagccttgcctcacagcatgtaaataattaaaacaatattgatgctgaggttcttctactgctagtatgaaagtgacaaatttttactggtgtgaattgggaagaaaacaatgctattccatgacgtttgtaaaatgtttgtaaaagctcaaacatgacgattccataaaataaacttgaggttaaataatgggtagtaaattatagaatgtataagaaaaaatataaaggagaaaatcaattatcaggaaagctaaagaacttttcaaatctagtaatttgaatatagacacaatgcactttattgcactttcaattcttataaagcaacaataatattaaggtccttgactatgtgtacaatgttttcacatatatagtttcatttaatcatttcaaagttaatctctgccatctcgctaaatcatcagtctcggctcttctgaaatagaaggtgcctgatcttcctaataattctgcctattttcatttgctttaaacaggcgccctattttctttctagttgtggctgcgcaaaaacatttatctcccaaataagatgtgctgcttaccgaggtatcacggggtggggctccagcttgggtcgttgaagctggggtttgggaaaccacttcagagatggcagcagcaagtttagcatcttcaaatttcttttattgaaaaaaattttattagtaacatgttgtatataaaattatgagcacaatgccatcacttaactataactcttaaagatagcttaatgactgtttattctcttgaccaaatagactcataataacatataattttaaaagaaatttaaattctttcttctctattgtattattttatacaatttgctatttctatttccttctcatattgattattctaaatactatgcaataatataacttagagttccacggtttgtttacacatttcctgttgtacatttaggttattcaaagttttcagctcttttaaaattgctctgaataagttctagtgagtgagttatggtgctggctatattttgctaaactgccctctcaaatgttgctaggaattcatactgcgaaaagcaatgaataagcatgcctgttttcccatggccttgcttgccagaatttgacttttattatgataatcagtgtaaaatgatatactactattgcttgtatattgtggtatacggtgtcaggtttcagggttttttttcaacgttaaatattctagaaactttctgaaataatttctgtttaaaaatattgaatatttgcttcatttcaaatactcccttttgacaaaaaaacttaggtataactgttgatgaaaaaccagaaaaaagtccagaactctttggtgactccaactatggatagcttattttgaaaaaggagaattgcaaattttaccaaaagatggagaaaagcacattaaaaagataccaacattcagaaattcatttcagcatgttattattggaaattatttaaactaatttagataactataagatacttattgtccatttataccctgtaaagccgttttagaatgtaatattttaggtaatccaaaatgtactaaattaaattcatttttagttatgagaaatctttgcttatatgacaaatgaaaagaataacaagttgtcaaatgaaaagaatgacattgaaacatttgtattgtctcttcttaaactatcttattgacttattatttaagccttttaatactaagtatgaaacaacctatggtctggaaatttgtatcgcaaagctatatgtgcatatgttatttaattcatctaacgctacacaaaagcataaaataatgatttttcactctctttaaaaatactaaatcatttatgtccatttctcaattttttcattgatctatgctttgagtttgctttctcaacattattgtattttccacttattattactgtataacatatgctagtgtttagttggattaatcttacctaaaagtactgaaaaatgctttttagtactttttcatattttatacatttattttccgaatgtatcattgaataattttattgagttataaaagtatcttattgctatttaataaaaaattaacac

SEQ ID NO: 31 - protein, 948 aa, Homo sapiens
MVFLPLKWSLAIMSFLLSSLLALLTVSTPSWCQSTEASPKRSDGTPFPWNKIRLPEYVIPVHYDLLIHANLTTLTFWGTTKVEITASQPTSTIILHSHHLQISRATLRKGAGERLSEEPLQVLEHPPQEQIALLAPEPLLVGLPYTVVIHYAGNLSETFHGFYKSTYRTKEGELRILASTQFEPTAARMAFPCFDEPAFKASFSIKIRREPRHLAISNMPLVKSVTVAEGLIEDHFDVTVKMSTYLVAFIISDFESVSKITKSGVKVSVYAVPDKINQADYALDAAVTLLEFYEDYFSIPYPLPKQDLAAIPDFQSGAMENWGLTTYRESALLFDAEKSSASSKLGITVTVAHELAHQWFGNLVTMEWWNDLWLNEGFAKFMEFVSVSVTHPELKVGDYFFGKCFDAMEVDALNSSHPVSTPVENPAQIREMFDDVSYDKGACILNMLREYLSADAFKSGIVQYLQKHSYKNTKNEDLWDSMASICPTDGVKGMDGFCSRSQHSSSSSHWHQEGVDVKTMMNTWTLQRGFPLITITVRGRNVHMKQEHYMKGSDGAPDTGYLWHVPLTFITSKSNMVHRFLLKTKTDVLILPEEVEWIKFNVGMNGYYIVHYEDDGWDSLTGLLKGTHTAVSSNDRASLINNAFQLVSIGKLSIEKALDLSLYLKHETEIMPVFQGLNELIPMYKLMEKRDMNEVETQFKAFLIRLLRDLIDKQTWTDEGSVSEQMLRSELLLLACVHNYQPCVQRAEGYFRKWKESNGNLSLPVDVTLAVFAVGAQSTEGWDFLYSKYQFSLSSTEKSQIEFALCRTQNKEKLQWLLDESFKGDKIKTQEFPQILTLIGRNPVGYPLAWQFLRKNWNKLVQKFELGSSSIAHMVMGTTNQFSTRTRLEEVKGFFSSLKENGSQLRCVQQTIETIEENIGWMDKNFDKIRVWLQSEKLEHDPEADATG

SEQ ID NO: 32 - DNA, 4808 bp, Homo sapiens
gcagtggtggtggcggcggcgcaagggtgagggcggccccagaaccccaggtaggtagagcaagaagatggtgtttctgcccctcaaatggtcccttgcaaccatgtcatttctactttcctcactgttggctctcttaactgtgtccactccttcatggtgtcagagcactgaagcatctccaaaacgtagtgatgggacaccatttccttggaataaaatacgacttcctgagtacgtcatcccagttcattatgatctcttgatccatgcaaaccttaccacgctgaccttctggggaaccacgaaagtagaaatcacagccagtcagcccaccagcaccatcatcctgcatagtcaccacctgcagatatctagggccaccctcaggaagggagctggagagaggctatcggaagaacccctgcaggtcctggaacacccccgtcaggagcaaattgcactgctggctcccgagcccctccttgtcgggctcccgtacacagttgtcattcactatgctggcaatctttcggagactttccacggattttacaaaagcacctacagaaccaaggaaggggaactgaggatactagcatcaacacaatttgaacccactgcagctagaatggcctttccctgctttgatgaacctgccttcaaagcaagtttctcaatcaaaattagaagagagccaaggcacctagccatctccaatatgccattggtgaaatctgtgactgttgctgaaggactcatagaagaccattttgatgtcactgtgaagatgagcacctatctggtggccttcatcatttcagattttgagtctgtcagcaagataaccaagagtggagtcaaggtttctgtttatgctgtgccagacaagataaatcaagcagattatgcactggatgctgcggtgactcttctagaattttatgaggattatttcagcataccgtatcccctacccaaacaagatcttgctgctattcccgactttcagtctggtgctatggaaaactggggactgacaacatatagagaatctgctctgttgtttgatgcagaaaagtcttctgcatcaagtaagcttgacatcacaatgactgtggcccatgaactagcccaccagtggtttgggaacctggtcactatggaatggtggaatgatctttggctaaatgaaggatttgccaaatttatggagtttgtgtctgtcagtgtgacccatcctgaactgaaagttggagattatttctttggcaaatgttttgacgcaatggaggtagatgctttaaattcctcacaccctgtgtctacacctgtggaaaatcctgctcagatccgggagatgtttgatgatgtttcttatgataagggagcttgtattctgaatatgctaagggagtatcttagcgctgacgcatttaaaagtggtattgtacagtatctccagaagcatagctataaaaatacaaaaaacgaggacctgtgggatagtatggcaagtatttgccctacagatggtgtaaaagggatggatggcttttgctctagaagtcaacattcatcttcatcctcacattggcatcaggaaagggtggatgtgaaaaccatgatgaacacttggacactgcagaggggttttcccctaataaccatcacagtgagggggaggaatgtacacatgaagcaagagcactacatgaagggctctgacggcgccccggacactgggtacctgtggcatgttccattgacattcatcaccagcaaatccgacatggtccatcgatttttgctaaaaacaaaaacagatgtgctcatcctcccagaagaggtggaatggatcaaatttaatgtgggcatgaatggctattacattgtgcattacgaggatgatggatgggactctttgactggccttttaaaaggaacacacacagcagtcagcagtaatgatcgggcaagtctcattaacaatgcatttcagctcgtcagcattgggaagctgtccattgaaaaggccttggatttatccctgtacttgaaacatgaaactgaaattatgcccgtgtttcaaggtttgaatgagctgattcctatgtataagttaatggagaaaagagatatgaatgaagtggaaactcaattcaaggccttcctcatcaggctgctaagggacctcattgataagcagacatggacagacgagggctcagtctcagagcgaatgctgcggagtgaactactactcctcgcctgtgtgcacaactatcagccgtgcgtacagagggcagaaggctatttcagaaagtggaaggaatccaatggaaacttgagcctgcctgtcgacgtgaccttggcagtgtttgctgtgggggcccagagcacagaaggctgggattttctttatagtaaatatcagttttctttgtccagtactgagaaaagccaaattgaatttgccctctgcagaacccaaaataaggaaaagcttcaatggctactagatgaaagctttaagggagataaaataaaaactcaggagtttccacaaattcttacactcattggcaggaacccagtaggatacccactggcctggcaatttctgaggaaaaactggaacaaacttgtacaaaagtttgaacttggctcatcttccatagcccacatggtaatgggtacaacaaatcaattctccacaagaacacggcttgaagaggtaaaaggattcttcagctctttgaaagaaaatggttctcagctccgttgtgtccaacagacaattgaaaccattgaagaaaacatcggttggatggataagaattttgataaaatcagagtgtggctgcaaagtgaaaagcttgaacgtatgtaaaaattcctcccttgccaggttcctgttatctctaatcaccaacattttgttgagtgtattttcaaactagagatggctgttttggctccaactggagatacttttttcccttcaactcattttttgactatccctgtgaaaagaatagctgttagtttttcatgaatgggctatcgctaccatgtgttttgttcatcacaggtgttgccctgcaacgtaaacccaagtgttgggttccctgccacagaagaataaagtaccttattcttctcattttatagtttatgcttaagcacccgtgtccaaaaccctgtaccccatgtttatcattcataaactgtttcatcagtctcctcgaaagactctgaatagtcgactactgaacaatgaacacctggatctgagactaagccggacgatgactgggttaaagctctcccggctcacccctccagacccgctgcccatccctcttccttgctccatgcccaggggctgacttgtaaaggccaagtcatcaagctttcttgccctttggatgttggtcagtggggagccggagagctggagctggggtcggaggaggtagtaggtggaggtgttcttccctgattcccttgcgggatgcctcgggctggcctcccctgagggtcttagctccgagaggggaccctcttttccacacagccttctccacctctggattttggtaactgctccctcctcatcccttcaggattagtggcctcagtgggagtctggcttttactagtcctggcggacttgtggtttctacataatgtgctcgcacttttgcaaaaaatctttttatagaaccctcctcagataattctgagtgtctgtcatctatttccctgactggtacagtatctcttctgaaaaagcagagtgcattcaagtctgtaggaaaacccttttcttagggaggtgattttttttctctctctgcttcttatttggcctactttacaatttctaactaactagttattggcatttactgacagtaaattattgcagtcaccaataaatgatagtacattgtgaaacaaaatatttgctcatattagcaaataggacattctttggctttgaagtctttcttttgtgaagacttcacacacggttgcttcagcacacagttgctgctcaggttttatgtatagatgataataatagaaagcacagtttactaacatggtaaaccaacggagttcaagtcaagtcagttaataccctaagaattagattttatttcttattctgaaaacttgctacacagggacttatctaacccatagtgtgctctgttgctgacttgattcaagttgcagcgtgttttgcgctgactctaaggtgcggaaatcctcacacctggcaaaggagaattcaaactgaactttttgaatataaggcaaaaacttcaagataagggaatatgattgatgattggtacgaaaaatgtcaaaatgtgttcccctaatacacgacaaaatagagtgacttctggacataaatctgccatttattaaaccattcactacaacaaataaataggtataaaagtggaattggaatttttatacttatttgttgtagtgaatggtttaataaaaatagaaatcactggtaatttccaccccaaactaaactatttcccttcttttaaaaaaatacacaaccaagattttaatgtaaaatattttgctttaattgtattttatgccttgattaatgaaacatggaaatattgattttcagttttggtcacctgaggaacctatctttgtttgcttttggaaaagcccattttctaaacagatacaatattgccacaacaatgtgcagaaacctttttgataataaaaaattgttctttgcctctaaaaaaaaa

SEQ ID NO: 33 - protein, 941 aa, Homo sapiens [sequence omitted]

SEQ ID NO: 34 - DNA, 101 bp, Homo sapiens
tcaccagctccatgacagtttacaaatgccactgcaacgtcgggaagctatcctatatggtctaaaaaggggaggcatgaataatttcccccgcttagcat

SEQ ID NO: 35 - DNA, 101 bp, Homo sapiens
agctggagagaggctatcggaagaacccctgcaggtcctggaacacccccctcaggagcaaattgcactgctggctcccgagcccctccttgtcgggctcc

SEQ ID NO: 36 - DNA, 101 bp, Homo sapiens
tgttgtttgatgcagaaaagtcttctgcatcaagtaagcttgacatcacagtgactgtggcccatgaactggcccaccaggtataagctcattcacacttt

SEQ ID NO: 37 - DNA, 101 bp, Homo sapiens
tctgcatcaagtaagcttgacatcacaatgactgtggcccatgaactggctcaccaggtataagctcattcacacttttaataaagtataaactacattta

SEQ ID NO: 38 - DNA, 101 bp, Homo sapiens
ttgacattttttatctaaatgtaaatcataggtgatgttttcttttttctatctcaatagggagattatttctttggcaaatgttttgacgcaatggaggt

SEQ ID NO: 39 - DNA, 101 bp, Homo sapiens
ttatcttttcagggagcttgtattctgaatatgctaagggagtatcttagtgctgacgcatttaaaagtggtattgtacagtatctccagaagcatagcta

SEQ ID NO: 40 - DNA, 101 bp, Homo sapiens
aaaaacgaggacctgtgggatagtatggcaagtgtgagtatgtttttgaatatctctgcatttgggattgacaggcttatcatcttgttttgttttccctg

SEQ ID NO: 41 - DNA, 101 bp, Homo sapiens
tcaggaaggggtggatgtgaaaaccatgatgaacacttggacactgcagaagggttttcccctaataaccatcacagtgagggggaggaatgtacacatga

SEQ ID NO: 42 - DNA, 101 bp, Homo sapiens
tggcacatgataggtgatttaataactgcttgttgaattgaatcaacaaatgaacaatccacctctcctttcttttaggtacctgtggcatgttccattga

SEQ ID NO: 43 - DNA, 101 bp, Homo sapiens
ataactgcttgttgaattgaatcaacaaaggaacaatccacctctcctttattttaggtacctgtggcatgttccattgacattcatcaccagcaaatccg

SEQ ID NO: 44 - DNA, 101 bp, Homo sapiens
cttttaggtacctgtggcatgttccattgacattcatcaccagcaaatccaacatggtccatcgatttttgctaaaaacaaaaacaggtaatttattttgg

SEQ ID NO: 45 - DNA, 101 bp, Homo sapiens
ggacctcattgataagcagacatggacagacgagggctcagtctcagagcaaatgctgcggagtgaactactactcctcgcctgtgtgcacaactatcagc

SEQ ID NO: 46 - DNA, 101 bp, Homo sapiens
agcagacatggacagacgagggctcagtctcagagcgaatgctgcggagtcaactactactcctcgcctgtgtgcacaactatcagccgtgcgtacagagg

SEQ ID NO: 47 - DNA, 101 bp, Homo sapiens
gtggctgcaaagtgaaaagcttgaacgtatgtaaaaattcctcccttgcccggttcctgttatctctaatcaccaacattttgttgagtgtattttcaaac

SEQ ID NO: 48 - DNA, 116 bp, Homo sapiens
tttgactatccctgtgaaaagaatagctgttagtttttcatgaatgggctttttcatgaatgggctatcgctaccatgtgttttgttcatcacaggtgttgccctgcaacgtaaac

SEQ ID NO: 49 - DNA, 101 bp, Homo sapiens
tccacacagccttctccacctctggattttggtaactgctccctcctcattccttcaggattagtggcctcagtgggagtctggcttttactagtcctggc

SEQ ID NO: 50 - DNA, 101 bp, Homo sapiens
atttaatcatttcaaagttaatctctgccatctcgctaaatcatcagtctcggctcttctgaaatagaaggtgcctgatcttcctaataattctgcctatt

SEQ ID NO: 51 - DNA, 101 bp, Homo sapiens
ttgtatataaaattatgagcacaatgccatcacttaactataactcttaaagatagcttaatgactgtttattctcttgaccaaatagactcataataaca

SEQ ID NO: 52 - DNA, 101 bp, Homo sapiens
taacgatagcttaatgactgtttattctcttgaccaaatagactcataatgacatataattttaaaagaaatttaaattctttcttctctattgtattatt

SEQ ID NO: 53 - DNA, 101 bp, Homo sapiens
gaaatttgtatcgcaaagctatatgtgcatatgttatttaattcatctaacgctacacaaaagcataaaataatgatttttcactctctttaaaaatacta

SEQ ID NO: 54 - DNA, 51 bp, Homo sapiens
taactttgggctttcggtggaaatctatataggcttaaaagatgcagagaa

SEQ ID NO: 55 - DNA, 51 bp, Homo sapiens
taaacttaagttccataaagccagatgctatacagtgcaaaggctaatgtg

SEQ ID NO: 56 - DNA, 1542 bp, Homo sapiens
gtgtcagcatttgatttccagggtactagggtgactttctccaaggtccagtgtcagtggggagtggtgcttgatcagatgttcctctgatatggttctggttttgcttctttcatgagcctggtttcccaaatgtcctgcaactctgtgacccgtgtagtgagccactcaggatcccctaatgattccttttctgcctatatcagccagagcttgttcggttgctttcaaccaagaaccctgacaggtagagttaatttaaactttgaacatcaaatgatgctttctagtacgtgttaatgattgttgctaactgtaaacatctttcttatatgaaaccataacatagggaaggtccttttactttcaggaaaagacctagtacttttggaagtttatgcctatttctgtgaatgctgggtggatacattctgaaattatgctgtgtcaataacattttaatgacatatatttttgcttttgtacatttgtgccgctaggtaggtagagcaagaagatggtgtttctgcccctcaaatggtcccttgcaaccatgtcatttctactttcctcactgttggctctcttaactgtgtccactccttcatggtgtcagagcactgaagcatctccaaaacgtagtgatgggacaccatttccttggaataaaatacgacttcctgagtacgtcatcccagttcattatgatctcttgatccatgcaaaccttaccacgctgaccttctggggaaccacgaaagtagaaatcacagccagtcagcccaccagcaccatcatcctgcatagtcaccacctgcagatatctagggccaccctcaggaagggagctggagagaggctatcggaagaacccctgcaggtcctggaacacccccstcaggagcaaattgcactgctggctcccgagcccctccttgtcgggctcccgtacacagttgtcattcactatgctggcaatctttcggagactttccacggattttacaaaagcacctacagaaccaaggaaggggaactgaggtatttttttttctctttttcttttaaactgcaagtgctgcccacgctaaattcattatttcagattgattgtcttttaaaattccctttgctgttgaactttttcttcagttttgcttttgcatcttctttatagtgttaaaaatggctttttcccttgctttttaaatctcattttaaaattctattttaaccaattttctttcccccagctctatcagagtaaatatctatttgtttatttagttcgatttctgagacataataaacatgtttaattttcctgaactgtgcattagtttcctagggctgttgtaacaaagtaccacagactgggtggctataaacaacaaaatgtattctctctcaggtctggaggctagaagtctgaaatcaaggtgtcagcaggcccgtgctccctccagactctgggtagaatccttccttatatcttcctagcatctagtggtggccgtggatccctggtactccatgcctagc

SEQ ID NO: 57 - DNA, 1763 bp, Homo sapiens
ttctgaaacaactcttcagtcttttttgggcttctcgatattgacattttttgaagagtactggccagttattttatagaatgcctttcagtttggattttctgctgtttctccatgatcaggttcagcttacatatcattgacaggaatcccaaggaggtgatattgtgtccttcctaatatactattcaggaggcacatgagtcctgaagttaggcctctgagatgcaatcagccaatcactgtaaaaaggctttcagggttcacgtgagtccaaattcttagctctactcaaggagtccaagaaaaggaaatagtgcccgagctgacactccctacaaagctggaaaacagactggggatgttttgagagcttggctgtagcagttttggtactatcttgttctaaactaaccagtgcctggcacatgataggtgatttaataactgcttgttgaattgaatcaacaaakgaacaatccacctctcctttmttttaggtacctgtggcatgttccattgacattcatcaccagcaaatccracatggtccatcgatttttgctaaaaacaaaaacaggtaatttattttggaaactactagttaattcaaggaggaatgtgaaaatgtgtaggattaaagtgctgtttcttttgctatttatcttggttaaagcaaaagggatcagattgaaaatgctttctggtttcaaagaagaatggccaatatcttgccagatagagattatagctgaattacataatgctaaaaaggagggattaccagtgaacattcactattactttgttaacattactgggttatatcatatgtatggccagagatgtagttgccattcttttcatagatctgtaaatctcacaaaattgatgtctaaagctagtgttagcttttgtctattgagttgctgttttctggtttctgagagaaataagtgatgttttcaaatttttcagtattaaactcttctctaatttccttgcccaatcttggatgagaaaagctttcttcaggcaagggagcaaatggaactttgatttattttatttactctagatgtgctcatcctcccagaagaggtggaatggatcaaatttaatgtgggcatgaatggctattacattgtgcattacgaggatgatggatgggactctttgactggccttttaaaaggaacacacacagcagtcagcagtaatgatcgggcaagtctcattaacaatgcatttcagctcgtcaggtaatacacgctgcacaaagtcgcggtttatttctgaaagcagctgttattgttcaaattcttgatttctaaagacaaaaatgattgattgataacaagaagttgaaaggtgttttccttttaagttcttctaacaacccaagattgcttttagtcttataattaacctcctgtctgtgactactaaggcacttgaaggaaggaatctgtatcttaatctttctcattaataattcagatcatactgaggcggaagtgtagataaccaggagatcaacatcctggcgaaactccttgccttgtccccgcggcatggtcccgcagcttcttctggccccgctataccggatcaggtttctcccaccactgggtctttataacagccttgaagtcttcttagaagactaagtgacacaggcccaagttgtttgcattacatttcttgggttaaagaagggatttttttttctttcctaaaccagatacctgaactttgcagca

SEQ ID NO: 58 - DNA, 1349 bp, Homo sapiens
gctccatcagccctccatgctcaaggctgcctgggctccctggacatatccacttttccttccctggcatctacctctgcctccatctctagtgctccaccccttgttgtactggcctctccttagtcctgccctggaatggcagtgggagagccaggtagtagctcaaggtccaatgtttaatctgcaccattatccccactcacatgtgaacaaagggagttggcagatgatgctaatttgccccatcgggaggtctggctactgatagaaaataagggcctcagtgggctcagagcataagcaatcacattagacaaatctcctgcctaaacaggtccaggtttaacctgcttactctgtttcacaaattgccagacattaacagtgttcctgcagttgcgttttcaaagaaatgtgttttattgcaaaagaatatgtgatttcagatgagactgcaatgaaactatagataacaattatttctattatcttttcagggagcttgtattctgaatatgctaagggagtatcttagygctgacgcatttaaaagtggtattgtacagtatctccagaagcatagctataaaaatacaaaaaacgaggacctgtgggatagtatggcaagtgtgagtatgtttttgaayatctctgcatttgggattgacaggcttatcatcttgttttgttttccctgcattatgttaatccctctgaggagaatcattgttttctatagaaataagagtgatgtgtttatttttggtttttagatttgccctacagatggtgtaaaagggatggatggcttttgctctagaagtcaacattcatcttcatcctcagtaagtttctatatctgtacatgttcccccaagcacattcttttactgcatattctttgaaaggcagctctgtgccaaactttctgagatccttgattatatcaccctcattccagataagactgcatttaaactattccatactcataatctttttcaatttttcttaaagtgtatctatactggagggttgcagagctttccttggtaatgcttctcactgatactaatttctctagcttcccttttaaagcagtggatttatgacatgtttctatagcagattacagctgcattgtagcagtcaaaaggatatgtcagtcatttacagagctctgcatttgtacaaagacaatggcactgagcattcttgaatacttgtcatgtgtcaggcacatgttaagcacttatatgtattatctcctttactcttcataataaacctgtgagctgggtactattactatccctatttttaaagttgagaacatgaaatacaaa

SEQ ID NO: 59 - DNA, 1133 bp, Homo sapiens
tattttcttatgtttctacatgatctttagtaataaaaatgattatggatacatattgtcctgttgagctaatgtgctctaataaagctggttaaggttctccatttattttcattatgtttttaaaggtaagtatctttgctctaaaacagtacagacaatgattggaaatgttgaaattactatacagttaatttcttgttgtgttgctgtttggctataggcataattgtttcgtttttagattaatacgaaattttctttattctaaaggacttaagatgaacaaaatctataatgtttaactaaaatcattgtttcttgggtagcttttagaatatattaattctattttgtttcataaatattaggaaatatggaataggttgcccccaaaatgtgaagtatggacttcttgcctcagataaaatgtcccacctttgacattttttatctaaatgtaaatcataggtgatgttttcttttttctrtctcaatagggagattatttctttggcaaatgttttgacgcaatggaggtagatgctttaaattcctcacaccctgtgtctacacctgtggaaaatcctgctcagatccgggagatgtttgatgatgtttcttatgataaggtaaaagtagattgagtataaggatacagtttagatactaaagttatacatactggggtggagaagttataggcaaggttgtggggttaaacccagattgaatgccttctctcttgacatgtgctggctggagtcaactcttttaggactaacttgcagtttggctcataaccctaaagattattttatgggaaattcttcatatattctttcttgggttgaaaattcatggcttacagaaactctgcttttattcatcattcaacaaataggtattgattgagcatcaactttgtactagacaaaaatccctgccctcgtgtagcttacttttcaaggccttcagcaatggttaatattgttgagacgcaaataattgtcttgcacagtgtgcttagtaacagagttgggaattgttgacaacagtttaatgattgggagattttatgtaaaatccagatttctagcttctcttggggaagaaaaaggaggatttggcca

SEQ ID NO: 60 - DNA, 2025 bp, Homo sapiens
agaaacttcctccctagtgtaaacatgccagatgttgtgttatatgtgatagaaaagagacttatatagtagttatctatctgtttatttattttttggagatggagtctcactttgtcgcccaggctggagtgcagtggtgccatctcagctcaccgcctctgcctcccgggttcaagtgattctccggcctcagcctcccacataccaagtacctgccaccatgcctggctattttatgtatttttagtagagacggggtttcaccatgttggccaggctggtcttgaactcccgacctcaggtgatccacctgccttggcctcctaaagtgctgggattacaggcatgagccaccgcgcccggccgtagttatctatttataagggacatttatatctgattgcttgttttgctagaagattaaaatatattttgaagcaaaaagttgacttcccggatttacttttaaaccactaaccacagtgtctcttggtcagcattgggaagctgtccattgaaaaggccttggatttatccctgtacttgaaacatgaaactgaaattatgcccgtgtttcaaggtttgaatgagctgattcctatgtataagttaatggagaaaagagatatgaatgaagtggaaactcaattcaaggtaaaagcctgaaataaaagttatgtaattattatttgtgttaaaaagagtgttaatcattgtgtgtgtgtgtgtgtgtgtgtgtgtgtgtgtgtgtatctttatatacatattaaggaaaagcaaataaatattagttcagtatttagatggactagcaaagattttggttttatttggcactaaaaataggaatggcattcttagactctatttaatttgcatggatttgttatttccttcctttcacaaaccttttatttcattttcctttcctattacaatggctgacgttcagattttctgggactcttcatggtacttgaggaagaggcacaaaattgttacgcttggcaaaatgtcctgaagtcttgttgcataatttgctctcaaaatttagtcatgtaaactctctttgagtttgttttaaaagtcgcaattcatcctgactttaagtagataggatatcttataaaagtttgttatgaaaatatgaaagtcattcatcattatttattgtttttggcccttttataattaaacagtgctgcatgatttatacagtaaaagttagattatgctttaaaaattagcccccatcatctgagaccataatggattatattaacatgaaatgacctgtgacaatactggtccctgtttccctgtacaacgccctcaggccttcctcatcaggctgctaagggacctcattgataagcagacatggacagacgagggctcagtctcagagcraatgctgcggagtsaactactactcctcgcctgtgtgcacaactatcagccgtgcgtacagagggcagaaggctatttcagaaagtggaaggaatccaatggaaacttgaggtcagtccttactaaataaccaatttgttgatgtgaagggcatcttttctgttttccatcattggtactaaacattagggaaaacaaaaagtttaagtgtctcccctgctgcccttttctggaaaataaattgctttttaagatttatctatgtatctcgtaactttaagaaatgctaggagggaacttctatgcataaaagtcaaatatctggggagttaggatggtatgggaataattctcattttgtataggcaatgcaaaatcttattaaacggtgacagccatgccatagagaaacacatgcattgtattttatagtagtttctttgggcttccaaattccctgacagggatgcatagtaattgctgacactgtctaagcaaggtaggattttaccgtatctggaaatccctattcttgctacacttcagtcctttttacatttggagcttaaaccccacccaggaaacatttatgccaacaacctacatgcttca

SEQ ID NO: 61 - DNA, 3081 bp, Homo sapiens
  exon (501)..(2912)
tgctgaagagatcaaattataaacacacacatgcacacatagctagcatttaacagtatctaacagttggtagggaatcaataaacctaggtaccctttctctctgttcccttccttctaaccatttctaagctcggtaatgtgctgttttgatctcacaggctctagaactaggactccttaaagtccttactccaaggtctgtgtcctctacatccctgctagggctttgaaactagaagtgaatgctgccaaatcctctgacttatcgctctttgtagtgcacttcaactctaaagacgaaatcacggccagggcgacaggctaaagtctgagtcagggtgagcttttggggaaacggcgtggagcgggtggtggtgtcagctctctcctcgcctacacttcagctcctttctgcccacatccattcagggcattgccctgtttgtctcctcagctgtcttctgtattaacctccagcctgttgggtgcattcagttctgccagctggactttcaatatgtatttaaaaagacacataaacaaaaaacaaaaacaaaaacaaaaaaactttactagaagccaaaggaaaaccatcatattcaaaaatataaatataaaagcaaagaaatgcatacatttactggacaaagaggtctcatcttgagtaaactgggagcactccgagatgtctggaggtcttggaggctacacgctatccattgatacctcctgtcaaattctgaacatgcagaaattaccagatctcaaagtcctcatttcttggttgaattttagtgaaaaaaacttccctggatcccaccgtagttgagtcttggaacaggggtgttaatctttatattataaaatgtccttgactagagataataggcagtatgaaacattatatttttaaaaaggaaacataatattgaaaaaaaaagagaaatactgttgcagtgacttggaatccccagttctcaaagggaagaaggccaataaagaagtgggagaagaaagtctgagaaccgcatgaaaagggtcctgttcccactaggaccatggtccactcaccaaattatcagagacgtttgaaccagagcaactccatcttgaataggagctgggtaaaataaggctgagacctactgggctacactcccaggaggttagacattctaagtcacagaatgagatagaaggtaggcacaagacacaggtcataaagacctgctgataaaacaggttgcagtaaggaagctggccaaaacccaccaaaaccaggatggcaatgagagtgtcctctggtcgtcactgctacggtctcaccagctccatgacagtttacaaatgccactgcaacgtcgggaagctaycctatatggtctaaaaaggggaggcatgaataatttcccccgcttagcatataatcaagaaataaccctaaaaatggacaaccaacagcccttgggggtgctctgcctatgagtagccattcttttattcctttagtttcttaattacttgctttcactttactccatggactcccctcaaattctttcttgcgcaaaatccaagaaccctctcttggggtctggatcgggacccattttcggtaataaacttgtagcatttggtgttttaatgtttgtgttttcttgacttgttacctcatttagcctcaactgtttaaagatggtctttttggccattttattcagctttaattgttctaaggggagtgaagaaatggtcatttactttgaaaaatcagagggaacgtgttgatgcgggaagcagctaatccttggggtacagtggcccttggtagtgcaggaaagtcctgggggccacctctaacccaccttcctcctctacagcatctcccactgtagtcattctctaccgaagccccagaaggtgcggcactttgccacgacagagtactgggttcatgtttctttccgaggcgggccaagagctctcagcccactggcagtggcgagatgacggacacccagcgagtccaatgggcgtcgaacgcgtctaggcttggtggacttgtcagcgcctgcctggcttcggtccccaacttgagcaccggccctttcctgcatgcccctaaccctcgcaacgctaaacagtgaaaaaaaaaaaaagacaaaaacaaaaagcatctcaacacacacacacacacacacacacacacacacacacacacacacacacacacacacacacacacacacggatccgcgttcagaaaggcgtgcacttcctacgcctgatcccccgcatcgcaacctcgcagcttccccggcgtgcagcgctcatttaccaattcccttcctgggagttgcggcttccctcgctcggccccactcccgtttaccctttccccagctcccgccttagccaggggcttccccgcctgccgctagggctcgggccgaagcgccgctcagcgccagcctgccgctccccgggctccactttcactttcggtcctgggggagctaggccggcggcagtggtggtggcggcggcgcaagggtgagggcggccccagaaccccaggtacagcgcgctcgagccgcgggtaggggactgcgggccgggaggagagcgcggcacccgccccttccctgcgcccgtcaagtggggggctgagggcctggggcacgggaggagggagacggggcacgggaggagggagacggggcgcgggaggaaggcgacggggcgcgggaggaaggcgacggggcgcgagacagggcgcgggaagggcggggggagtcgctggctaggcccgagtccgcggggtgcccggcgggttggcggcgggcccacccctgccggtccctgtccctgtccctccgggcgcgtggccggtgcgcctgcttcacgggtctccccgctgttcggccggcgggagcctccctcagcgctccgcctggcgcctggatgcctgccagtcctgcaggccaccgacgcccgcgcgaggccaaaaggcggggtggggcgggcagctggctcgggctgaggagggcacctgcccatagctgctagagaaaccca

SEQ ID NO: 62 - DNA, 1349 bp, Homo sapiens; identical to SEQ ID NO: 58

SEQ ID NO: 63 - DNA, 1156 bp, Homo sapiens
tttcttaaaagcttttttagtatcaaaaaacagctccttttgagttcccactatttgttgagtgtgggtcatctctgtgttctcactttagaaacacaggctcttgactgaacattgtttccaccttgcttgtccaaaaccagcatagttaggtaggtattgaaaacctggcactttctctcccttctcttccttcattcattcacatgcctgctttgtgcccagtgttattgccagccccaaagtgtgcccggcagaactaggtatgctacctgtcctccagacacgtatgtgtagtggaggaaaatgacaagcaaacagctggtgctctaatggaggtgtgatggctggggacatcacactgagaaagggatcagaaagtgctcctaagaggggaggttggcaactggtagcggctgtttgagcataagctggtgttctgtcttttcttagagttgggttaaatgggtgatgtgtctgcctttttgtgtacacaccagcattggcatcaggaaggggtggatgtgaaaaccatgatgaacacttggacactgcagargggttttcccctaataaccatcacagtgagggggaggaatgtacacatgaagcaagagcactacatgaagggctctgacggcgccccggacactgggtaatgctcctagagtaaaatttgttttgttgtctaggtaacatctgccttgtaggatggaaccttgcttttgaaataatgcccttaccactattgctaaaatatttcagctgcatctgtgtatcctatgaagttgacttatactccctgcccccatcttcccagtaggattaaggaggctttaaaccttggttattctcagtaaaggtgacgatgtaattactttaacattctcatattttgtaatttgatatgatggtaatttctggttactggcttgaaatcaactccaacctaagcaactgctactagattacaatagtgcctagcatttggttggagctgaggacaaaagaatttaggtgatttccgagaatgatgagagactcagttgtcttcttctgagttagatttggaacctgtttgtcagcttaatgctatagaagaatattattagaaacaagatgctgcaacttgattgaccctggatggataccgtta

SEQ ID NO: 64 - DNA, 3652 bp, Homo sapiens
gggtcttaccgccataacttgctaagaatcccattccccacagtgtttctataataacatacaaggccaggcccatggagaaagacagcacttacgtggtggaaactgttttgcttggcaaagaaaaagactctgcacattctgctttttagatatcatgtttttaaaaaacgaagtttgcatctgtgagaacagaataacacattaaatagacacaattaaaccttaattataaaatggtaaacagtgaagtcttttaaagtctggcaactgagaataaacaaaagaactgcagacaaaaaacagaacttgacatcatgaggcatgagctcatttcatacagcttatgtgtacataatcctattcagacagctgggactgccttctatatagaattttgacaaatgctggaattttggcttcagttttaactaaagttacatctgattaatgtgataaaattaattttttaaaacccactttttcctcacaaggtaaaaggattcttcagctctttgaaagaaaatggttctcagctccgttgtgtccaacagacaattgaaaccattgaagaaaacatcggttggatggataagaattttgataaaatcagagtgtggctgcaaagtgaaaagcttgaacgtatgtaaaaattcctcccttgccmggttcctgttatctctaatcaccaacattttgttgagtgtattttcaaactagagatggctgttttggctccaactggagatacttttttcccttcaactcattttttgactatccctgtgaaaagaatagctgttagtttttcatgaatgggctttttcatcaatgggctatcgctaccatgtgttttgttcatcacaggtgttgccctgcaacgtaaacccaagtgttgggttccctgccacagaagaataaagtaccttattcttctcattttatagtttatgcttaagcacccgtgtccaaaaccctgtaccccatgtttatcattcataaactgtttcatcagtctcctcgaaagactctgaatagtcgactactgaacaatgaacacctggatctgagactaagccggacgatgactgggttaaagctctcccggctcacccctccagacccgctgcccatccctcttccttgctccatgcccaggggctgacttgtaaaggccaagtcatcaagctttcttgccctttggatgttggtcagtggggagccggagagctggagctggggtcggaggaggtagtaggtggaggtgttcttccctgattcccttgcgggatgcctcgggctggcctcccctgagggtcttagctccgagaggggaccctcttttccacacagccttctccacctctggattttggtaactgctccctcctcatyccttcaggattagtggcctcagtgggagtctggcttttactagtcctggcggacttgtggtttctacataatgtgctcgcacttttgcaaaaaatctttttatagaaccctcctcagataattctgagtgtcatctatttccctgactggtacagtatctcttctgaaaaagcagagtgcattcaagtctgtaggaaaacccttttcttagggaggtgattttttttctctctctgcttcttatttggcctactttacaatttctaactaactagttattggcatttactgacagtaaattattgcagtcaccaataaatgatagtacattgtgaaacaaaatatttgctcatattagcaaataggacattctttggctttgaagtctttcttttgtgaagacttcacacacggttgcttcagcacacagttgctgctcaggttttatgtatagatgataataatagaaagcacagtttactaacatggtaaaccaacggagttcaagtcaagtcagttaataccctaagaattagattttatttcttattctgaaaacttgctacacagggacttatctaacccatagtgtgctctgttgctgacttgattcaagttgcagcgtgttttgcgctgactctaaggtgcggaaatcctcacacctggcaaaggagaattcaaactgaactttttgaatataaggcaaaaacttcaagataagggaatatgattgatgattggtacgaaaaatgtcaaaatgtgttcccctaatacacgacaaaatagagtgacttctggacataaatctgccatttattaaaccattcactacaacaaataaataggtataaaagtggaattggaatttttatacttatttgttgtagtgaatggtttaataaaaatagaaatcactggtaatttccaccccaaactaaactatttcccttcttttaaaaaaatacacaaccaagattttaatgtaaaatattttgctttaattgtattttatgccttgattaatgaaacatggaaatattgattttcagttttggtcacctgaggaacctatctttgtttgcttttggaaaagcccattttctaaacagatacaatattgccacaacaatgtgcagaaacctttttgataataaaaaattgttctttgcctctaagtggatatttgcaattattttctctctcctaactagactgtaaaaagggctgctttagatcctgtagcttactccagttattagttattaacaaacacccaagtctcgaagatatttctaattaaaaaagaaggcatattcagagttctttttaaataaatgttgtttacttttataggcatctttaaacttctggattttggtatgccatttaaaaatacttccagatacacatggaaattagtaatactgcagccgtatccttgcaaacacatctgtcagtgtcaaaggtttcaaggtttttcttaaaaaaagaaaacaaaaaagcaaacacctatactgcccaaatgggaggattagatacatggttagaaatccctcaggaaaagtgttttttcttttcttgttgctgccttaaaaatagaataatgactatttctgatggatagagacatagcattttaagctggtggtgtgtaaaatcccataggtatgtgcatgactttcagagagtatttgggggggaggttaacaagatgtggtgccatttataagcagtgttattgtttttgcttgccccgctgccacaagtcagctaagtcataacaaaagcttcaaactgatgctaaggaaggccatgccctttggaaacaataaattcccaatctgttttatgttatgtacctgacatcttttcctgcattctctaccaggaaataaagatgaaattaaatatcaaaattctaatcgatgatatcagtgcaatgttcaggaactattcattaagatattagaaaaccattcaaagtggtaggacatcagagcctacttcttacattgctgtgggagaaatgcaggtttcaaatttaatatatatatataatttttttaaaagcagaagtttctttttatatttggtaaacttaagttccataaagccagatgctatacagtgcaaaggctaatgtggcaatagctctaaagacacagttgctgctcaggttttatgtatagataatagaaagcacagtttactaacacagtaaaccaacagagttcaagtcagatgagtaccctaagaa

SEQ ID NO: 65 - DNA, 3413 bp, Homo sapiens
atcacagcaaagaaagctcccgtgaattatcatggtttatttgactcttcgatttcctaatatttttatctaaataaagctttataccttgttttagtgacatcttcaaataaaatgttaactaaaaacaagcctctctgatgggaaatgtgatcagagaagtgtcattgtaaaacctacttcttaaaggcaaaaaagtttttgattgcaaatgtttactgatagccttcatcagggcagaatctctggcctgaatattaagaactgaagtgtaaacggcagcctaggctattaatgattcttcctttctgttgcatggggactttcttcattgtgggtgtgtttacatacacacatgcacatgcacatgcacatacacacacacggggcattttactggttttaagtgctttattataatccaggattatagctgctaatggtagagctgcccggggccaggtctgggctttgtcatttgtgcctctggatattttcagatgatcctgaagctgacgcaacaggatgaaaatccatcagaatctcagactacagcactaaatatgctttgatgctacatcaaacggaatggaagcatagctgacttcgctaaagttacttcatctccatctagcaaatgaggcactgttctcaaccaaaggagatggggatctggtttagggcaatccctttataatttgatgtgctgtggtctccttggtaatgtataatttggtattgcacaggtgattagtcaaggaagtctggaaaagctttggtcccacagccttgcctcacagcatgtaaataattaaaacaatattgatgctgaggttcttctactgctagtatgaaagtgacaaatttttactggtgtgaattgggaagaaaacaatgctattccatgacgtttgtaaaatgtttgtaaaagctcaaacatgacgattccataaaataaacttgaggttaaataatgggtagtaaattatagaatgtataagaaaaaatataaaggagaaaatcaattatcaggaaagctaaagaacttttcaaatctagtaatttgaatatagacacaatgcactttattgcactttcaattcttataaagcaacaataatattaaggtccttgactatgtgtacaatgttttcacatatatagtttcatttaatcatttcaaagttaatctctgccatctcgctaaatcatcagtctyggctcttctgaaatagaaggtgcctgatcttcctaataattctgcctattttcatttgctttaaacaggtgccctattttctttctagttgtggctgcgcaaaaacatttatctcccaaataagatgtgctgcttaccgaggtatcacggggtggggctccagcttgggtcgttgaagctggggtttgggaaaccacttcagagatggcaacagcaagtttagcatcttcaaatttcttttattgaaaaaaattttattagtaacatgttgtatataaaattatgagcacaatgccatcacttaactataactcttaamgatagcttaatgactgtttattctcttgaccaaatagactcataatracatataattttaaaagaaatttaaattctttcttctctattgtattattttatacaatttgctatttctatttccttctcatattgattattctaaatactatgcaataatataacttagagttccacggtttgtttacacatttcctgttgtacatttaggttattcaaagttttcagctcttttaaaattgctctgaataagttctagtgagtgagttatggtgctggctatattttgctaaactgccctctcaaatgttgctaggaattcatactgcgaaaagcaatgaataagcatgcctgttttcccatggccttgcttgccagaatttgacttttattatgataatcagtgtaaaatgatatactactattgcttgtatattgtggtatacggtgtcaggtttcagggttttttttcaacgttaaatattctagaaactttctgaaataatttctgtttaaaaatattgaatatttgcttcatttcaaatactcccttttgacaaaaaaacttaggtataactgttgatgaaaaaccagaaaaaagtccagaactctttggtgactccaactatggatagcttattttgaaaaaggagaattgcaaattttaccaaaagatggagaaaagcacattaaaaagataccaacattcagaaattcatttcagcatgttattattggaaattatttaaactaatttagataactataagatacttattgtccatttataccctgtaaagccgttttagaatgtaatattttaggtaatccaaaatgtactaaattaaattcatttttagttatgagaaatctttgcttatatgacaaatgaaaagaataacaagttgtcaaatgaaaagaatgacattgaaacatttgtattgtctcttcttaaactatcttattgacttattatttaagccttttaatactaagtatgaaacaacctatggtctggaaatttgtatcgcaaagctatatgtgcatatgttatttaattcatctaaygctacacaaaagcataaaataatgatttttcactctctttaaaaatactaaatcatttatgtccatttctcaattttttcattgatctatgctttgagtttgctttctcaacattattgtattttccacttattattactgtataacatatgctagtgtttagctggattaatcttacctaaaagtactgaaaaatgctttttagtactttttcatattttatacatttattttccgaatgtatcattgaataattttattgagttataaaagtatcttattgctatttaataaaaaattaacacataaaatgacttgaattgtcatcattctttttaagatatttagttaaactgacttaatgtatggccttcaatttttttgtgtccttatttttctgatcatttctccttttatagtttacattaagtctgatctcatattaattacattttctcatctgttgttactaataaacatggcataatgttacttacaaatgtattatctacaagtagtgctatccacaaatatattcaaatgttcccttttaatgtttgtcatttttttcatgtgttgttaatgattcttccatgtgataataagcagaaatgacaataaacttttcatagtttctgcttttaaggaaaatgcctccagcatgatattgaatatttgattctgaaaactaaagactctttaacagattaggggattgcctactttttaaaaagtttttatttataatatgagtatatgtaaaattttaaatagatcttttacatggacatgattatttgtttctatt

SEQ ID NO: 66 - DNA, 3259 bp, Homo sapiens
caaggttggtggaagtcgcgttgtgcaggttcgtgcccggctggcgcggcgtggtttcactgttacatgccttgaagtgatgaggaggtttctgttactatatgctacacagcagggacaggcaaaggccatcgcagaagaaatgtgtgagcaagctgtggtacatggattttctgcagatcttcactgtattagtgaatccgataagtatgacctaaaaaccgaaacagctcctcttgttgttgtggtttctaccacgggcaccggagacccacccgacacagcccgcaagtttgttaaggaaatacagaaccaaacactgccggttgatttctttgctcacctgcggtatgggttactgggtctcggtgattcagaatacacctacttttgcaatggggggaagataattgataaacgacttcaagagcttggagcccggcatttctatgacactggacatgcagatgactgtgtaggtttagaacttgtggttgagccgtggattgctggactctggccagccctcagaaagcattttaggtcaagcagaggacaagaggagataagtggcgcactcccggtggcatcacctgcatccttgaggacagaccttgtgaagtcagagctgctacacattgaatctcaagtcgagcttctgagattcgatgattcaggaagaaaggattctgaggttttgaagcaaaatgcagtgaacagcaaccaatccaatgttgtaattgaagactttgagtcctcacttacccgttcggtacccccactctcacaagcctctctgaatattcctggtttacccccagaatatttacaggtacatctgcaggagtctcttggccaggaggaaagccaagtatctgtgacttcagcagatccagtttttcaagtgccaatttcaaaggcagttcaacttactacgaatgatgccataaaaaccactctgctggtagaattggacatttcaaatacagacttttcctatcagcctggagatgccttcagcgtgatctgccctaacagtgattctgaggtacaaagcctactccaaagactgcagcttgaagataaaagagagcactgcgtccttttgaaaataaaggcagacacaaagaagaaaggagctaccttaccccagcatatacctgcgggatgttctctccagttcatttttacctggtgtcttgaaatccgagcaattcctaaaaaggcatttttgcgagcccttgtggactataccagtgacagtgctgaaaagcgcaggctacaggagctgtgcagtaaacaaggggcagccgattatagccgctttgtacgagatgcctgtgcctgcttgttggatctcctcctcgctttcccttcttgccagccaccactcagtctcctgctcgaacatcttcctaaacttcaacccagaccatattcgtgtgcaagctcaagtttatttcacccaggaaagctccattttgtcttcaacattgtggaatttctgtctactgccacaacagaggttctgcggaagggagtatgtacaggctggctggccttgttggttgcttcagttcttcagccaaacatacatgcatcccatgaagacagcgggaaagccctggctcctaagatatccatctctcctcgaacaacaaattctttccacttaccagatgacccctcaatccccatcataatggtgggtccaggaaccggcatagccccgtttattgggttcctacaacatagagagaaactccaagaacaacacccagatggaaattttggagcaatgtggttgttttttggctgcaggcataaggatagggattatctattcagaaaagagctcagacatttccttaagcatgggatcttaactcatctaaaggtttccttctcaagagatgctcctgttggggaggaggaagccccagcaaagtatgtacaagacaacatccagcttcatggccagcaggtggcgagaatcctcctccaggagaacggccatatttatgtgtgtggagatgcaaagaatatggccaaggatgtacatgatgcccttgtgcaaataataagcaaagaggttggagttgaaaaactagaagcaatgaaaaccctggccactttaaaagaagaaaaacgctaccttcaggatatttggtcataaaaccagaaattaaagaaagaggattaagcttttttgactgaaagtactaaaagtcagctttactagtgccaaacctttaaattttcaaaagaaaattttctttcaacatttcttgaaggacatggagtggagattggatcatttaacaatataacaaaacttcctgatttgattttacgtatcttctatctacgcccttcctgtgcctgtgactctccccaaattgccctgttgccttgagctcttctgagctaaaggcagccttcagtccctatcagcgcctcctttacttcccagagaacttcacagagactctgtccttccatgcaaaggcttcctgaaataggggagactgactgagtagctcattcttgtgacttacagtgccaacatttaaaaaagtatgaaaatgatttatttttatatgatgtatacccataaagaatgctcatattaatgtacttaaattacacatgtagagcatatctgttatatgtttatgtaactatcaaatggttatttgttactaaagctatatttctgataaaaaatattttaggataattgcctacagagggatttatttttatgatgctgggaaatatgaaatgtattttaaaatttcactctgggcatatggatttatctatcaccattacttttttttaagtcacaatttcagaattttgggacatttgcattcaatttacaggtaccagtacgtacatattttaatagaaagatacaacctttttattttcactccttttatttctgctgcttggcacatttttgagttttcccacattatttgtctccatgataccactcaagcagtgtgctggacctaaaatactgactttagttagtatccttggatttttagattccccagtgtctaattccctgttataatttgcacaaacaaaacaaaatgttatgataatctttctccactgttctaatatatattgtatttttatttgatagcttgggatttaaaacatctctgttgaaggcttttgatccttttgagaaataaagatctgaaagaaatggcataatcttaaaaaaaaaaaaaaa

SEQ ID NO: 67 - protein, 698 aa, Homo sapiens
MRRFLLLYATQQGQAKAIAEEMCEQAVVHGFSADLHCISESDKYDLKTETAPLVVVVSTTGTGDPPDTARKFVKEIQNQTLPVDFFAHLRYGLLGLGDSEYTYFCNGGKIIDKRLQELGARHFYDTGHADDCVGLELVVEPWIAGLWPALRKHFRSSRGQEEISGALPVASPASLRTDLVKSELLHIESQVELLRFDDSGRKDSEVLKQNAVNSNQSNVVIEDFESSLTRSVPPLSQASLNIPGLPPEYLQVHLQESLGQEESQVSVTSADPVFQVPISKAVQLTTNDAIKTTLLVELDISNTDFSYQPGDAFSVICPNSDSEVQSLLQRLQLEDKREHCVLLKIKADTKKKGATLPQHIPAGCSLQFIFTWCLEIRAIPKKAFLRALVDYTSDSAEKRRLQELCSKQGAADYSRFVRDACACLLDLLLAFPSCQPPLSLLLEHLPKLQPRPYSCASSSLFHPGKLHFVFNIVEFLSTATTEVLRKGVCTGWLALLVASVLQPNIHASHEDSGKALAPKISISPRTTNSFHLPDDPSIPIIMVGPGTGIAPFIGFLQHREKLQEQHPDGNFGAMWLFFGCRHKDRDYLFRKELRHFLKHGILTHLKVSFSRDAPVGEEEAPAKYVQDNIQLHGQQVARILLQENGHIYVCGDAKNMAKDVHDALVQIISKEVGVEKLEAMKTLATLKEEKRYLQDIWS

SEQ ID NO: 68 - DNA, 3291 bp, Homo sapiens
ggagctttctattggtcctgggtaccgagcatgggcgctgcgtcagtgcgcgctggcgcaaggttggtggaagtcgcgttgtgcagtttcactgttacatgccttgaagtgatgaggaggtttctgttactatatgctacacagcagggacaggcaaaggccatcgcagaagaaatgtgtgagcaagctgtggtacatggattttctgcagatcttcactgtattagtgaatccgataagtatgacctaaaaaccgaaacagctcctcttgttgttgtggtttctaccacgggcaccggagacccacccgacacagcccgcaagtttgttaaggaaatacagaaccaaacactgccggttgatttctttgctcacctgcggtatgggttactgggtctcggtgattcagaatacacctacttttgcaatggggggaagataattgataaacgacttcaagagcttggagcccggcatttctatgacactggacatgcagatgactgtgtaggtttagaacttgtggttgagccgtggattgctggactctggccagccctcagaaagcattttaggtcaagcagaggacaagaggagataagtggcgcactcccggtggcatcacctgcatccttgaggacagaccttgtgaagtcagagctgctacacattgaatctcaagtcgagcttctgagattcgatgattcaggaagaaaggattctgaggttttgaagcaaaatgcagtgaacagcaaccaatccaatgttgtaattgaagactttgagtcctcacttacccgttcggtacccccactctcacaagcctctctgaatattcctggtttacccccagaatatttacaggtacatctgcaggagtctcttggccaggaggaaagccaagtatctgtgacttcagcagatccagtttttcaagtgccaatttcaaaggcagttcaacttactacgaatgatgccataaaaaccactctgctggtagaattggacatttcaaatacagacttttcctatcagcctggagatgccttcagcgtgatctgccctaacagtgattctgaggtacaaagcctactccaaagactgcagcttgaagataaaagagagcactgcgtccttttgaaaataaaggcagacacaaagaagaaaggagctaccttaccccagcatatacctgcgggatgttctctccagttcatttttacctggtgtcttgaaatccgagcaattcctaaaaaggcatttttgcgagcccttgtggactataccagtgacagtgctgaaaagcgcaggctacaggagctgtgcagtaaacaaggggcagccgattatagccgctttgtacgagatgcctgtgcctgcttgttggatctcctcctcgctttcccttcttgccagccaccactcagtctcctgctcgaacatcttcctaaacttcaacccagaccatattcgtgtgcaagctcaagtttatttcacccaggaaagctccattttgtcttcaacattgtggaatttctgtctactgccacaacagaggttctgcggaagggagtatgtacaggctggctggccttgttggttgcttcagttcttcagccaaacatacatgcatcccatgaagacagcgggaaagccctggctcctaagatatccatctctcctcgaacaacaaattctttccacttaccagatgacccctcaatccccatcataatggtgggtccaggaaccggcatagccccgtttattgggttcctacaacatagagagaaactccaagaacaacacccagatggaaattttggagcaatgtggttgttttttggctgcaggcataaggatagggattatctattcagaaaagagctcagacatttccttaagcatgggatcttaactcatctaaaggtttccttctcaagagatgctcctgttggggaggaggaagccccagcaaagtatgtacaagacaacatccagcttcatggccagcaggtggcgagaatcctcctccaggagaacggccatatttatgtgtgtggagatgcaaagaatatggccaaggatgtacatgatgcccttgtgcaaataataagcaaagaggttggagttgaaaaactagaagcaatgaaaaccctggccactttaaaagaagaaaaacgctaccttcaggatatttggtcataaaaccagaaattaaagaaagaggattaagcttttttgactgaaagtactaaaagtcagctttactagtgccaaacctttaaattttcaaaagaaaattttctttcaacatttcttgaaggacatggagtggagattggatcatttaacaatataacaaaacttcctgatttgattttacgtatcttctatctacgcccttcctgtgcctgtgactctccccaaattgccctgttgccttgagctcttctgagctaaaggcagccttcagtccctatcagcgcctcctttacttcccagagaacttcacagagactctgtccttccatgcaaaggcttcctgaaataggggagactgactgagtagctcattcttgtgacttacagtgccaacatttaaaaaagtatgaaaatgatttatttttatatgatgtatacccataaagaatgctcatattaatgtacttaaattacacatgtagagcatatctgttatatgtttatgtaactatcaaatggttatttgttactaaagctatatttctgataaaaaatattttaggataattgcctacagagggatttatttttatgatgctgggaaatatgaaatgtattttaaaatttcactctgggcatatggatttatctatcaccattacttttttttaagtcacaatttcagaattttgggacatttgcattcaatttacaggtaccagtacgtacatattttaatagaaagatacaacctttttattttcactccttttatttctgctgcttggcacatttttgagttttcccacattatttgtctccatgataccactcaagcagtgtgctggacctaaaatactgactttagttagtatccttggatttttagattccccagtgtctaattccctgttataatttgcacaaacaaaacaaaatgttatgataatctttctccactgttctaatatatattgtatttttatttgatagcttgggatttaaaacatctctgttgaaggcttttgatccttttgagaaataaagatctgaaagaaatggcataatcttaaaaaaaaaaaaaaa

SEQ ID NO: 69 - protein, 725 aa, Homo sapiens
MGAASVRAGARLVEVALCSFTVTCLEVMRRFLLLYATQQGQAKAIAEEMCEQAVVHGFSADLHCISESDKYDLKTETAPLVVVVSTTGTGDPPDTARKFVKEIQNQTLPVDFFAHLRYGLLGLGDSEYTYFCNGGKIIDKRLQELGARHFYDTGHADDCVGLELVVEPWIAGLWPALRKHFRSSRGQEEISGALPVASPASLRTDLVKSELLHIESQVELLRFDDSGRKDSEVLKQNAVNSNQSNVVIEDFESSLTRSVPPLSQASLNIPGLPPEYLQVHLQESLGQEESQVSVTSADPVFQVPISKAVQLTTNDAIKTTLLVELDISNTDFSYQPGDAFSVICPNSDSEVQSLLQRLQLEDKREHCVLLKIKADTKKKGATLPQHIPAGCSLQFIFTWCLEIRAIPKKAFLRALVDYTSDSAEKRRLQELCSKQGAADYSRFVRDACACLLDLLLAFPSCQPPLSLLLEHLPKLQPRPYSCASSSLFHPGKLHFVFNIVEFLSTATTEVLRKGVCTGWLALLVASVLQPNIHASHEDSGKALAPKISISPRTTNSFHLPDDPSIPIIMVGPGTGIAPFIGFLQHREKLQEQHPDGNFGAMWLFFGCRHKDRDYLFRKELRHFLKHGILTHLKVSFSRDAPVGEEEAPAKYVQDNIQLHGQQVARILLQENGHIYVCGDAKNMAKDVHDALVQIISKEVGVEKLEAMKTLATLKEEKRYLQDIWS

SEQ ID NO: 70 - DNA, 101 bp, Homo sapiens
acacgaggaagaagttgaagcacaaagttactttgcccagtttatgcagggggttaagtggcagagctagggttcaaactcaggcaatgtagctcttaagg

SEQ ID NO: 71 - DNA, 101 bp, Homo sapiens
gcggcgcaatgtgattggcccaggtccccttcggagctttctattggtcccgggtaccgagcatgggcgctgcgtcagtgcgcgctggcgcaaggttggtg

SEQ ID NO: 72 - DNA, 100 bp, Homo sapiens
cgggggtgggcagccggcttgcgcccgtggttcccacgcccttcggcctcgggggtcgccgcgggcgcgggctggggctcggacttggcctttggccttt

SEQ ID NO: 73 - DNA, 101 bp, Homo sapiens
aggacaagaggagataagtggcgcactcccggtggcatcacctgcatccttgaggacagaccttgtgaagtcagagctgctacacattgaatctcaagtcg

SEQ ID NO: 74 - DNA, 101 bp, Homo sapiens
ataagtggcgcactcccggtggcatcacctgcatcctcgaggacagacctcgtgaagtcagagctgctacacattgaatctcaagtcgagcttctgagatt

SEQ ID NO: 75 - DNA, 101 bp, Homo sapiens
tgaagataaaagagagcactgcgtccttttgaaaataaaggcagacacaaggaagaaaggtaacagccctgatgctgtgacgttggggtgttgtgggccag

SEQ ID NO: 76 - DNA, 101 bp, Homo sapiens
tgtttctccaaaatcttagactcaggcttccagatcattagagtttactagtttattcagtgaaaacttacctgctttatggaagacagtaccaggcataa

SEQ ID NO: 77 - DNA, 101 bp, Homo sapiens
agaaattagtaccttaacctcagcattgttaactcatactctttgtttcactagaaaaaacagtgttgtctcacccacatcattcattactgtcataagaa

SEQ ID NO: 78 - DNA, 101 bp, Homo sapiens
acaaccttttagtgatccattatatattatatttcagaaaagagctcagatatttccttaagcatgggatcttaactcatctaaaggtttccttctcaaga

SEQ ID NO: 79 - DNA, 101 bp, Homo sapiens
ttctcaagagatgctcctgttggggaggaggaagccccagcaaagtatgtacaagacaacatccagcttcatggccagcaggtggcgagaatcctcctcca

SEQ ID NO: 80 - DNA, 101 bp, Homo sapiens
ccagcaaagtatgtgcaagacaacatccagcttcatggccagcaggtggcaagaatcctcctccaggagaacggccatatttatgtgtgtgggtgagtcat

SEQ ID NO: 81 - DNA, 101 bp, Homo sapiens
tatgtttatgtaactatcaaatggttatttgttactaaagctatatttctaataaaaaatattttaggataattgcctacagagggatttatttttatgat

SEQ ID NO: 82 - DNA, 3086 bp, Homo sapiens
  exon (1501)..(2621)
aggttacttttttccaactgtcagaatttataaccaactcaccttgcagccgttgaaggaaaagaggcttgaatatttttgccagaaagttgactggatggcattcattaagtgaacatgaatgaagaagtttcaataatgatttgggtggaaaataattgaaatgagtgaatagcacgttttccagctttctaaataaagcagaggcatttggtggcaaataattgagtttcccaaatggttccattaaggcagaaatctgacgaggtgaaaatttttctgtttggcaaacaaaagtttctgccactgcattgaggatgggttttgaaagaatcagttctctactgcagtactccatgaccctgcagacaacttcaggatccaacgtgaggcacaccgcagctacacgatgctctagggcttttgtaaaaaatgtgtcatggtgcccaaaatatatgaacgcctccaagactctcctaagctcctcgttagtgaaatgtgggacatgcctcacgacatatttgcccaattttataatcagaggaaatgcttgactttgatcaagaaccaccagggcagtgagcatttggctaatcaatttaggactcaggttggaaactattgatagggaaaagttgtttatcttatttaaaaatgtttggtgttcatccactttttcagtacatgcctgcaagattctataaagggccacaatatcctccggggtaaatgtttccaatttttcaccttgaagttgatttataatgagttctagtgtcacacaacctgaactgtgcagtgtaatcagactttccccaagaatacaaagattgcgaacttccatgccaccttttctgagacgattttggcattctgccaccaggttcagcaacaggctactttgaggatccacatgcaacagaatcagagcttgcaaagcagtcactaaactagtgtttgacagctgtgagggctccttttcaaactgaaagcataaagcttgaaagatgctattctccagtatttcttttggcagcccttgatcaccatcctttttttccacttcacaaattcgttgtaaagctcctgctgccatagtgtcaggcagggtttccatcgtgcttataaaacttagcacttcttctgatgaagtcaagttgctcagtctcctgtaaaacatctgactctcctcatttttaacattttgttcaagcctgtcgcagtcagatacttgagagaacactggtccaccgagtggatgaaggtcatttccatttttcgaatgaaactttttacaatgggcatgatggaatttgaccccgaaaggctcaggttgtcgtgaacacaaccaagggcacagacgctccttgactaccttgtgaacatgatttagaggtttattttttaaagcagccagagctctatgcatctgaaaatcagataaacgataaaggttcttcctcaaggtgattaatgccataccatcagattctcaatttgataactaaattaaaaaatttaaaaacacatggttaaatacattgagaacatgattgacccaacatcaatgtttatgaaactacaaacgagtatctggaaaaaaaaaaaaaaaaaaaaaaaggatggttaacatataaacaccagaggggcaaagtctctgcatcctagagttagaagagtggctgacattgaacaataacaatcgctattacttgctaaacactgttgtaggtattctattaacttacacagattcagtacttttactatcattttacacgaggaagaagttgaagcacaaagttactttgcccagtttatgcaggkggttaagtggcagagctagggttcaaactcaggcaatgtagctcttaagggtggcccttaaatgttggttgaaggaagaaattgcatttggatagaaatcaaagaacaggtaaagtgggcaaaattaggcgaggttagagcaaggcaagggtaaaaacgcgctggaaaggccctaagctgttggtttcccctcggtgtcgggagaaggttagtgttgaaggaaagggtctactttgtcaatggaaacaaggtaggaaaagaaaaagcaaaacatagatcaatgaagggagaaggtggggcggccagtccagatctaaagacggtgcggggggatttggcaacacgtgtgtgcaagacagacagacgggaggccccgcggcgcgttttcctaggaatgaaagggacccgcggggcgagcacccccaaactcggcgccccggggacctgcgctgagacacgggccgggcggcgcagcctgaggagaaagccggccaggtctttgacacccagccggaccaactgcgcggagaccccgcgttgacacctaccgcgctctgccgggcaatcactccgggtggtcgcggaagcgcctgggcgtcgtgggcctccgtagcaaacgcggggcgggagcacgactcagggcggcgcaatgtgattggcccaggtccccttcggagctttctattggtccygggtaccgagcatgggcgctgcgtcagtgcgcgctggcgcaaggttggtggaagtcgcgttgtgcaggttcgtgcccggctggcgcggcgtgggtaagctgcctgtcggctacggttcccggattccggccgctcgccctgcactaatctcctgggagaggcggcccggggcgggggtgggcagccggcttgcgcccgtggttcccacgcccttcggcctcgggggtcgccgcgggcgcgggctggggctcggacttggcctttggcctttggctttggtgtccccgggagcgtgtccttgggctcggcgtcggcctctgccgcgggaggcccctgggcggcgtggggtctctcctcatgttctgcctttggttctaggcgctttccaggcctagggaaaccgcactcggggacgcggggaactggggaacatgccgggttggggcggcgcgctccggggaacccgggacgttccgagcgcccacccggcgggacgcggccgtgagttctgcccgcggccgtgagctctgcccaccgcctccgcgccgcttccggggctgctggggc

SEQ ID NO: 83 - DNA, 1380 bp, Homo sapiens
  exon (1)..(2)
  exon (501)..(879)
atttcttggtgatattttaatctgtaggaaacagatcagtagatcagtaaattggctaggcaaaaaaaaaaaaaaaaaaggtgcatttgatggatggaatgagcatttgcagcattatggtagccttggattttggttaagttctgttagcattagtatgcctatttaaaattatatcttcttaaaataaagtttaccaattctggaatattaggaggaattctattcctgtcatcctattactagaatatcttcctatccctcttcatttcttctacctttatacatactcatgttttcagctacggtgctaatgaacacataatatatcctgcttgttaaaacttaatcatgaagtattttttgtattccgaatggtcttcatagtgtttctaacaagtgcatactttgccaaatggacagactgtcattatcctgttctgtgttcagatggagaacttaggcatttgttttgtttttcgtttgtttttactgtccagtttagaacttgtggttgagccgtggattgctggactctggccagccctcagaaagcattttaggtcaagcagaggacaagaggagataagtggcgcactcccggtggcatcacctgcatcctygaggacagacctygtgaagtcagagctgctacacattgaatctcaagtcgagcttctgagattcgatgattcaggaagaaaggattctgaggttttgaagcaaaatgcagtgaacagcaaccaatccaatgttgtaattgaagactttgagtcctcacttacccgttcggtacccccactctcacaagcctctctgaatattcctggtttacccccagaatatttacaggtacatctgcaggagtctcttggccaggtaaggaagtttttctttatgctatagatgctatttaatcatggatgtttgctttgggcttttaaattattattacattagaagagaggtcaacaaactatggcttactggcccaatgtggcccagagcctttcttttgtaaatagattttactggaacacagccatgcctattcatttaggtagtgtctatgacagcttttgagctgcaatagcagagttagtggttaccacaggggcctgcaatgcctaaggcatttggccccttccagtaaaagttttcccacccaggtattacaaaaggtcttgtattattacttctgtatttgaagaagtagataagaactcagtttcatcattattttggagaactaacaacttggtttctcattttagatgagtcaaacagagatgagttgtgtgggcagtgagttgagtatcacattgcataatagctaatttctccccacaggcagtgtatggtaccctgaagtttttctaa

SEQ ID NO: 84 - DNA, 2012 bp, Homo sapiens
  exon (1)..(2)
  exon (501)..(654)
  exon (1415)..(1503)
tgttttatacttaaggaaataaagtaccctttcctgtcccctaaaggaaaagagtaaagtaaggagaagaaaattgaaaaccaatgcatttgaccataattagtttcttttggtcataatgtatgttttcgtgtgtgtgtgcatgtatgtttttgtaagagggatttttatatttacatgggttattgaaaacaccataggaccttactttgtagagaacaaggaaggtctgacttccattctttaagtatgataaaaggcaaaacactgggtaactaccagatttcgttttaatagtaactgctaataatgaaagtatgtttatttggttagttgggcttattttttaaaacaattgtgtgtttttttttttgaaattctattttctgagttcacatattaaaatcataatattgaaaactatatttttgttaccctacagcttaaactatgtaacacgtataatgtattttttttttttcattttggctcttctctagaatacagacttttcctatcagcctggagatgccttcagcgtgatctgccctaacagtgattctgaggtacaaagcctactccaaagactgcagcttgaagataaaagagagcactgcgtccttttgaaaataaaggcagacacaargaagaaaggtaacagccctgatgctgtgacgttggggtgttgtgggccagtggactggagctgatggtgagagtgtggctctaaggttcagggtcctgtgtgttggccgcacagatgcctggggctcagctgcgcatcaaggtctgggaacacaggcatacgctggtattggtagtttcttaactttcatgttaattgcactgaataagaagataatggatgttctaattattggacatttgtggacatgaaaactgagtgtaaatgtagtttttgagaagcattggcctaggttatttttaaaaattcttttcctattatgtttacttctcatagtatgtttgtttttgctcatttattatataaaataattgctttttccataattaagagaagttatttatttttcaaaatataaatatattatttacttagaatcttgaagtagtcctaaattgattttttgagaagaataatgctaatggagtactgctgtctttttagctttcatttccttaattttaaataattttcctttcttttatttggcctatcttgaatttatagtcttcttatgtttttgtaaggtggagttttttactgtattcattttggggaatttttttggctgaataaacattgccacaagtcatgttgcactttgatgcgctgtaaagtactacagtaattgtgttttggggagtgtgtaaaacattttattcttcatcttctatgtcatgaacccctttcccgtctttacctgaaaaggagctaccttaccccagcatatacctgcgggatgttctctccagttcatttttacctggtgtcttgaaatccgagcaattcctaaaaaggtatttttttctgtcttcttcaggtaactattttaaaatatgcttagctttatttaggattgattaaacaaatttagaatatgccctttgcagtcttaaaaaatgtgatcttgatagcatgtttttaatattagttcccaagggtgtgtgctatcatcgtaactatcatctatgaatctttttatgttgtatttgcatttaaatttttgttttctattgaaatgagggcttaaatagggctttttcttagtctaaatagggctttttctttgtcttacttttactagttattaactacgtagcacattccacagtgatggaggtgactgcagttgaccttgtgttacccagctacacattgctgctccttctttaattggtgacagaaagctaatgagagcgtaggattccccccaaccaccacttgccacttcctacagttgttaagatctactttgtgtaatactacataactatttattgctgtaacagaaagcttcaggaaaaat

SEQ ID NO: 85 - DNA, 1044 bp, Homo sapiens
  exon (1)..(2)
  exon (501)..(543)
taattattttaaatgtaagatggaaaatatttcaagcctaagcattttcagtaattcttgaaagagtagcctttaatctttttgggatcatgactttattttaaatctgaaaactgggcacctccctgcagaaaactgcgcacctccctgcagaaaactgcacatatacctagtaagggtttgctgagctcctcacctctgaagccaacttatggacccattcctagaagcctttgcttttaaaattcgcctttgggtagaaatactgatttaagagtaagaaaatgcatcttatctggtttttaactttaggagttgaaagaaaaaatagtaatattttacttgaacacaaagttcaagtgcttaactatgatttaaaactagaacatgatttgagtattctaaataagacatggaatttttttttttttttttttttttaggtaaggttattttcagtagtagtgaattaataattgcttgtttttatttttttctagaacatcttcctaaacttcaacccagaccatattcgtgtgcaaggtactactatttattcacgtaatatatagcattgtttctccaaaatcttagactcaggcttccagatcattagagtttactartttattcagtgaaaacttacctgctttatggaagacagtaccaggcataataaagcagaagaagaatcatagagctcctgtcctctgggacttcatagaatttaacatcttgggtggcttcccatggcccagtactatgtttccccacttaggagtctcaggctcctccacatgcttcctgtgtccgtgtgcccagccaccttcactgagtggcagccggaggcaggggagacagaaaagttccactataaaacatttgatgagtccgggcgtggtgactcactcctgtaatcccagcactttgggaggccgaggcgggcggatcatgaggtcaggagatcaagaccatcctggctaacacggtgaaaccccgtctctactaaaaatacaaaaaattagccgggcgtggtggcaggcg

SEQ ID NO: 86 - DNA, 1188 bp, Homo sapiens
  exon (501)..(687)
gcattatttaccgtgtaatgtgaaaagaaatctacttttgtagggatgtcttttaaagatgtttttactttgaatttttagttttctcctttctgggtgtatacttcagtcactttcaagttttatgatcttaccagtagataatgtatggatatttgttagaatttatccccatttcttcacatctttataataaatattgagtgaatgaatcctttacatgaagatccttagggcatattagattttataaatatcatctagtcctagtgcaagcaaataaaattggaaactttcttgaataacaaaatgtagggtgtgagagtgtgaaggttgggggcagtttttaattacgtaataatggctttcctctgtgaggatttggaaggtagattagagcctataaggaaatatttctaaactgaataaaaggattggtttgacccatatgtgtagtagtactgatatcgagttcaaaacttgtctgtgtatctttgcagctcaagtttatttcacccaggaaagctccattttgtcttcaacattgtggaatttctgtctactgccacaacagaggttctgcggaagggagtatgtacaggctggctggccttgttggttgcttcagttcttcagccaaacatacatgcatcccatgaagacagcgggaaagccctggctcctaaggtaagaaattagtaccttaacctcagcattgttaactcatactctttgtttcaytagaaaaaacagtgttgtctcacccacatcattcattactgtcataagaaaatttatgctgttcttgaattttaaaatctctattgcaagagcagaaaactgtttacttccatgtactctttaactagtgtgtgtattttctgaatgtataaagcatgaattttatatagtacggtctttgcttgtcctattcatggaaaagaagaccttttatgttgatattcttggtacattggcctggggaggggtggagaactgtctaggaagtatttaaggggggtgatgagagacagtctcattttatgtttaagatgtatactgcctctcaaataagtagttttacattgggagtctgagggcaactaaagattaattttatattgtccaattttggctagtagggtccccgcatccctgtttttctgcttttgttatctgtggtgtctg

SEQ ID NO: 87 - DNA, 1385 bp, Homo sapiens
  exon (501)..(593)
  exon (702)..(884)
gatactatttgtcagatagtagagtcctgtccttcggacagttattttatttcgttttaattttttccttaagcaaaagcataatcacagatgtctctgtctcatcagtgtgttcaccatttcgtagacactttacacattctgcctttaacagccctgagccacttttccatagtacaagttcatttattcataaaattgctattaatgttattgaatgtagagctctctctagatctcacagtgtgatactttgaattgtcctcattttgtgtatgtcggatgtagctgcctctccacacacttgcctagtgtggcatctgctcgagtggccatgacagcctgtggagagtaaaatgctaattaaatgactgaatgttcaaatgcagagatggattttacaaatccgtctgagtttgttggtggtagttcctaatgaaagagattggttttacatattctttatatcacacacctaaactttttttttttccacttagagagaaactccaagaacaacacccagatggaaattttggagcaatgtggttgttttttggctgcaggcataaggatagggattatctattcaggtattgtacaattccagtattgtactcaaccactgagtgtacaattctaattctcagactttttcagcttgacaaccttttagtgatccattatatattatatttcagaaaagagctcagayatttccttaagcatgggatcttaactcatctaaaggtttccttctcaagagatgctcctgttggggaggaggaagccccagcaaagtatgtrcaagacaacatccagcttcatggccagcaggtggcragaatcctcctccaggagaacggccatatttatgtgtgtgggtgagtcattatcgtgcctaagtcgggtaggagagggccatcagtgatgtctgtagaagaaaaaaaggaccgagaagccaataatctagatatgtagggataagacatttgattcttaagtacaggaatagaaataacagttctgaaatgattttgacatatttaatagcccagaggttgttattatcagggaaatagtggtgaaagttaatgcttgcattgtacattcttggtaccatttacttacctgtttttagcctctgaaaattacactcatgttactacattaatcatgtgacttgaaatctccagattgattttgttatatataagaataggtgatttgtgctgttgtgaactattgataagtaagaaagaaaaagtatgatttttgatgctgagaatgtggatactaggattctttttctgctaggcataattcttggtgataaagttgaaacgttctgtgttactgaatttgatctactttctgaggcaaga

SEQ ID NO: 88 - DNA, 2209 bp, Homo sapiens
  exon (501)..(1708)
aagagttaagatgtagaagcacttcaaaaggacctggcacatagtaagtcctcaataaaggtgtctgttactaactgtatgtgtataaagacctagaagtgtgcgagagatctggttcccttcaggagcacgagtctactgtgtgctttgagagtggagggcagggaatgaggggtgagccagcaggtgggtcggagccaggcaggacctcagatgcttctctgacacctaggaaatccttggcctactgtcgggacctggagcctgtggaggattgggagctgtagaaccgtgtggtcagctctgtctcctagaacagtcactgtaggcaaaggcctggcctgggcatgagtgaggctgggagatctgtgtgagatgttctgagaagacggagggaagaactatggtggtacagtcaaaaggaattagacttgtgaattaaggaggatttactaaaaatgcctgtttgtaagcagtcatcttattattttcttttctagagatgcaaagaatatggccaaggatgtacatgatgcccttgtgcaaataataagcaaagaggttggagttgaaaaactagaagcaatgaaaaccctggccactttaaaagaagaaaaacgctaccttcaggatatttggtcataaaaccagaaattaaagaaagaggattaagcttttttgactgaaagtactaaaagtcagctttactagtgccaaacctttaaattttcaaaagaaaattttctttcaacatttcttgaaggacatggagtggagattggatcatttaacaatataacaaaacttcctgatttgattttacgtatcttctatctacgcccttcctgtgcctgtgactctccccaaattgccctgttgccttgagctcttctgagctaaggcagccttcagtccctatcagcgcctcctttacttcccagagaacttcacagagactctgtccttccatgcaaaggcttcctgaaatagggagactgactgagtagctcattcttgtgacttacagtgccaacatttaaaaaagtatgaaaatgatttatttttatatgatgtatacccataaagaatgctcatattaatgtacttaaattacacatgtagagcatatctgttatatgtttatgtaactatcaaatggttatttgttactaaagctatatttctrataaaaaatattttaggataattgcctacagagggatttatttttatgatgctggaaatatgaaatgtattttaaaatttcactctggcatatgatttatctatcaccattacttttttttaagtcacaatttcagaattttgggacatttgcattcaatttacaggtaccagtacgtacatattttaatagaaagatacaacctttttattttcactccttttatttctgctgcttggcacatttttgagttttcccacattatttgtctccatgataccactcaagcagtgtgctggacctaaaatactgactttagttagtatccttggatttttagattcccagtgtctaattccctgttataatttgcacaaacaaaacaaaatgttatgataatctttctccactgttctaatatatattgtatttttatttgatagcttgggatttaaaacatctctgttgaaggcttttgatccttttgagaaataaagatctgaaagaaatggcataatcttaaaacttggtaagtttttgtggctgtgtaatctcttcattattatatattttataatagaaaccaatctaaaaatatgggataggaaaatatactaagcaagtactatgtaacatacataattacatgtgtaagttgtatgtatcagccaagatacacttaaggtgaaaacattaaaagagacaaaaatattccttattaataagatacaacaatcaagaacttgtgtccacctaccaatactgtctataattacatgacccaaaacttttatctataaaaagaaactgacaaatagtcaatcataacttggtgttggaaactgacctaagccaatttgcttatacacagcatccaagttatgtctagaaactgctggattatctaagttttaggtgggtatcgttcagctgctccccgcagacttacgagctagtgatagtgaaaatacatttcatgataaatgctgctgtacatacagatatgtatttattatctattta

SEQ ID NO: 89 - DNA, 51 bp, Homo sapiens
accatagttcttccctccgtcttctgagaacatctcacacagatctcccag

SEQ ID NO: 90 - DNA, 12462 bp, Homo sapiens
gaagatggcggcggcggcggcggtgacggcgcttcccgtgcggctgaggacgatccgccagtgagcgcggagactgcttccacttcgggcgggggagcgccggaccgaatcggctctctaggccgtggagcttgccgtcccacctccgtccaaatcgacctttcctttctatccccaaccacccctcaacccctgttttcccctgccttccttgcagaggccatggaggacgaggagagacagaagaagctggaggccggcaaagccaagcttgcccagtttcgacaaagaaaagctcagtcggatgggcagagtccttccaagaagcagaaaaaaaagagaaaaacgtcaagcagtaaacatgatgtgtcagcacaccatgatttgaatattgatcaatcacagtgtaatgaaatgtacataaatagttctcagagagtagaatcaactgtgattcctgaatctacaataatgagaactctacatagtggagaaataaccagtcatgagcagggcttctctgtggaactggaaagtgaaatttcaaccacagcagatgactgcagttcagaggtaaatggttgcagttttgtgatgagaacaggaaagcctacaaatttattaagggaagaagaatttggtgttgatgattcttattctgaacaaggagcacaagacagtccgactcatctagagatgatggaaagtgagttggctgggaagcagcatgagattgaagagctaaacagagagctggaagaaatgagggttacctatgggactgaaggactgcagcagttacaagaatttgaagctgccattaaacaaagagatggcattataacccagctcactgctaatttacaacaagcaagaagagaaaaggatgagacaatgagagaatttttagagttgacagaacagagtcaaaaattacagattcaatttcagcaattacaggctagtgaaactctgagaaacagcactcatagtagcacagctgcagacttactacaagccaaacaacagatcctcactcatcaacagcagcttgaagaacaagaccacttattagaagattatcagaaaaagaaagaagacttcacaatgcaaattagtttcttgcaagagaaaattaaagtatatgaaatggaacaagataaaaaagtagaaaactcaaataaagaagaaatacaggaaaaggagacaatcattgaagaattaaacacaaaaataatagaagaagaaaagaaaactcttgagctaaaggataaattaacaactgctgataaattactaggagaattacaagaacagattgtgcaaaagaaccaagaaataaaaaacatgaaattagagctgactaattctaagcaaaaagaaagacagtcttctgaagaaataaaacagttaatggggacagtcgaagaacttcagaagagaaatcataaagacagccagttcgaaactgatatagtacaacgaatggaacaagaaacacaaagaaagttagaacaactccgggcagagctggatgagatgtatgggcagcagatagtgcaaatgaaacaagaattaataagacaacacatggcacagatggaggaaatgaaaacacggcataagggagaaatggagaatgctttaaggtcatattcaaatattacagttaatgaagatcagataaagttaatgaatgtggcaataaatgaactgaatataaaattgcaagatactaactctcaaaaggaaaaactcaaggaagaactaggactaattttagaagaaaagtgtgctctacagagacagcttgaagaccttgttgaagaattgagcttttcaagggaacagattcagagagctagacagacaatagctgaacaagaaagtaaacttaatgaagcacataagtcccttagtacagtggaagatttgaaagctgagattgtttctgcatctgaatccagaaaggaactagaattaaaacatgaagcagaagttacaaattacaagataaaacttgaaatgttagaaaaagaaaagaatgctgtgttagacagaatggctgaatcacaagaagctgaattagagaggctgagaacacagcttctatttagtcacgaagaagagctttccaaactgaaggaagatttagaaattgaacatcgaataaatattgaaaaacttaaagataatttaggcattcactataaacagcagatagatggtttacagaatgaaatgagtcaaaagatagaaaccatgcagtttgaaaaggacaatttgataactaagcagaatcaattaattttggaaatttcaaagctaaaagatttacagcagtctcttgtaaattcaaagtcagaagaaatgactcttcaaatcaatgaacttcaaaaagaaattgaaatactcagacaagaagaaaaagaaaagggtacacttgaacaagaagttcaagaattacaacttaaaacagaattgttagaaaaacagatgaaggaaaaagagaatgatcttcaagaaaaatttgcacaacttgaagcagagaatagcattcttaaagatgaaaagaaaacccttgaagacatgttgaaaatacatactcctgttagccaagaagaaagattgattttcttagactccattaagtccaaatccaaagactctgtgtgggaaaaagaaatagaaatacttatagaggaaaatgaggacctcaaacaacaatgtattcagctaaatgaagagattgaaaagcaaaggaacactttttcatttgctgaaaaaaactttgaagttaactatcaagagttacaagaggagtatgcttgccttctcaaagtaaaagatgatttagaagacagtaaaaataaacaggaattagagtataaaagtaaacttaaagcacttaatgaagagcttcatttgcaaagaataaatccaactacagtgaaaatgaaaagttctgtctttgatgaagacaaaacttttgtagcagaaacattggaaatgggtgaggttgttgaaaaggatacaacagaactcatggaaaaacttgaggtaaccaagcgagagaaattagagctgtcacagagactgtctgatctttctgaacaattgaaacagaaacatggtgagattagttttctaaatgaagaagttaaatctttaaagcaagagaaagaacaagtttcattgagatgtagagagctagaaatcattattaaccacaacagggcagaaaatgtacagtcatgtgatactcaagtaagctctttattagatggagttgtgaccatgacaagcaggggtgctgaaggatcagtttctaaagtaaataaaagttttggtgaagaatcaaaaataatggtggaagataaagtttcttttgaaaatatgactgttggagaagaaagtaagcaagaacagttgattttggatcacttaccatctgtaacaaaggaatcatcacttagagcaactcaaccaagtgaaaatgataaacttcagaaagaactcaatgtacttaaatcagaacagaatgatttaaggctacagatggaagcccaacgcatttgcctctctctggtttattcaactcatgtggatcaggttcgtgaatatatggaaaatgaaaaagataaagctctttgcagtcttaaagaagagcttatttttgctcaagaggaaaagatcaaggaacttcagaaaatacaccagttagaactacagactatgaaaacacaagaaacaggtgatgaaggaaagcctttacatctgctcattggaaaacttcaaaaggcagtgtctgaagaatgttcttattttttacagactttatgcagtgtccttggtgaatattatactcctgctttaaaatgtgaagtaaatgcagaagacaaagagaattctggtgattacatttctgaaaatgaagatccagaattacaagattatagatatgaagttcaagactttcaagaaaatatgcacactcttctcaacaaagtaacagaagaatacaacaaactcttggtacttcaaacacgactaagcaagatctggggacagcagacagatggtatgaaacttgaatttggagaagaaaaccttccaaaagaggaaacagagtttttatcaatccattctcagatgaccaatttggaagacattgatgtcaatcataaaagcaagttatcttctctgcaagatcttgaaaaaactaaacttgaagaacaagttcaagaattagaaagcctcatatcctctttgcagcaacagttgaaagaaactgaacaaaactatgaggcagagatccactgtttacagaagaggcttcaagctgttagtgagtccacggttccgccaagcttacctgttgattcggtggtaattacagaatctgatgcacagagaacaatgtaccctggaagttgtgtgaaaaagaatattgatggtacaatagagttttctggtgaatttggagtgaaagaggaaacaaatatcgttaagttgcttgaaaaacaataccaagaacaattagaagaagaagtagctaaggttattgtgtcaatgagtatagcatttgctcaacaaactgaactgtctagaatatctgggggaaaagaaaatactgcatcatcaaagcaagcacatgctgtgtgtcagcaagaacaacattattttaatgaaatgaaattatcacaggatcaaattggttttcagacttttgagacagtggatgtgaaatttaaagaagaatttaaaccacttagtaaagagttaggagaacatggaaaggaaattttattatcaaatagtgatccccatgatataccagaatcaaaggactgtgtgctgactatttcagaagaaatgttctccaaagataaaacatttatagttagacagtctattcatgatgagatttcagtgtcaagcatggatgcttctagacaactaatgttgaatgaagaacagttggaagatatgagacaggaacttgtacgacaataccaagaacatcaacaggcaacggaattgttaaggcaagcacatatgcggcaaatggagagacagcgagaagaccaggaacagctacaagaagagattaagagacttaatagacaattagcccagagatcctccatagataatgaaaacctggtttcagagagagagagggtgcttttagaggagctggaagcactaaagcagctgtctttagctggaagagagaagctgtgttgtgagctgcgcaacagcagtacgcaaacacagaatggaaatgaaaaccaaggagaagttgaagaacaaacatttaaagaaaaggaattagacagaaaacctgaagatgtgcctcctgagattttgtctaatgaaaggtatgcactccagaaagctaataatagacttttgaagatcctcttagaagttgtaaagacaacagcagctgttgaagaaacaattggtcgccatgtccttgggattctagatagatctagtaaaagccagtcatctgccagcctaatttggaggtcagaagcagaggcatctgtaaagtcatgtgtccatgaggaacatacaagagttacagatgaatccattccctcttattctggaagtgatatgccaagaaatgacattaacatgtggtcaaaagtaactgaggaaggaacagagctgtcacaacgacttgtgaggagtggttttgctggaactgaaatagaccctgaaaatgaagaacttatgctgaacattagctctcgactacaagcagcagttgaaaaactcctagaagccataagtgaaactagcagtcagcttgaacatgcgaaagtgacacagacagagttgatgcgtgagtcatttagacagaaacaagaagcaacagagtcccttaagtgccaagaggaacttcgagagcgccttcatgaggagtccagggccagagaacagctagctgtggagctcagtaaggctgagggcgtcattgatggctatgcagatgaaaaaactctttttgaaaggcaaattcaggaaaaaactgatataatagatcgtcttgagcaggagttgttatgtgcaagtaacaggttgcaagaattggaggcagagcaacagcagatccaagaagaaagagaattactgtccagacaaaaggaagctatgaaagcagaggcaggcccagttgaacaacaattactacaggagacagaaaaattaatgaaggaaaaactagaagtacaatgtcaagctgaaaaagtacgtgatgaccttcaaaaacaagtgaaagctctagaaatagatgtggaagaacaagtcagtaggtttatagagctggaacaagaaaaaaatactgaactaatggatttaagacagcaaaaccaagcattggaaaagcagttagaaaaaatgagaaaatttttagatgagcaagccattgacagagaacatgagagagatgtattccaacaggaaatacagaaactagaacagcaacttaaggttgttcctcgattccagcctatcagtgaacatcaaactagagaggttgaacagttagcaaatcatctgaaagaaaaaacagacaaatgcagtgagcttttgctctctaaagagcagcttcaaagggatatacaagaaaggaatgaagaaatagagaaactggagttcagagtaagagaactggagcaggcgcttcttgtgagtgcagatacttttcaaaaggtagaggaccgaaaacactttggagctgtagaagctaaaccagaattgtccctagaagtacaattgcaggctgaacgagatgccatagacagaaaggaaaaagagattacaaacttagaagagcaattagaacagtttagagaagaactggaaaataagaatgaagaagttcaacaattacatatgcaattagaaatacagaaaaaggaatctactacccgcctacaagaacttgaacaggaaaacaaattatttaaggatgacatggagaaactgggacttgccataaaggaatctgatgccatgtctactcaagaccaacatgtgctatttgggaaatttgctcaaataatacaggaaaaagaggtagaaattgaccaattaaatgaacaagttacgaaactccagcagcaacttaaaattacaacagataacaaggttattgaagaaaaaaatgaactgataagggatcttgaaacccaaatagaatgtttgatgagtgatcaagaatgtgtgaagagaaatagagaagaagaaatagagcagctcaatgaagtgattgaaaaacttcaacaggaattggcaaatattggacagaagacatcaatgaatgctcattccctctcagaagaagcagacagtttaaaacatcaattggatgtggttatagctgaaaagctggccttggaacagcaagtagaaaccgctaatgaagaaatgaccttcatgaaaaatgtacttaaagaaaccaattttaaaatgaatcagctaacacaggaattattcagcttaaagagagaacgtgaaagtgtggaaaagattcaaagcataccagagaatagtgttaacgtggctatagatcatctgagcaaagacaaacctgaactagaagtagtccttacagaggatgctcttaaatccctagaaaatcagacatacttcaaatcttttgaagaaaatggcaaaggttccataattaatttggaaacaaggttgctacaacttgagagcactgttagtgcaaaggacttagaacttacccagtgttataaacaaataaaagacatgcaagaacaaggccagtttgaaacagaaatgcttcaaaagaagattgtaaacctacagaaaatagttgaagaaaaagtggctgctgctcttgtcagtcaaatccaacttgaggcagttcaggaatatgcaaaattctgtcaagataatcaaacaatttcatcagaacctgaaagaacaaatattcagaatttaaatcaactaagagaagatgagttggggtcagatatatcagcattaaccttgagaatatcagaattagaaagccaggttgttgaaatgcatactagtttgattttagaaaaagaacaagtagaaattgcagaaaaaaatgttttagaaaaagaaaagaagctgctagaactacagaagctattggagggcaatgagaaaaaacagagagagaaagaaaagaaaagaagccctcaagatgttgaagttctcaagacaactactgagctatttcatagcaatgaagaaagtggattttttaatgaactcgaggctcttagagctgaatcagtggctaccaaagcagaacttgccagttataaagaaaaggctgaaaaacttcaagaagagcttttggtaaaagaaacaaatatgacatctcttcagaaagacttaagccaagttagggatcacctcgcagaggcaaaagagaaattgtccattttagaaaaagaagatgagactgaggtacaagaaagcaaaaaggcctgcatgtttgagccacttcctataaaactgagtaagagcattgcatcccagacagatgggactctgaagatcagtagcagcaatcagactccacaaattcttgttaaaaatgcaggaatacaaattaatttacagagtgaatgttcctcagaagaagttactgaaataatcagtcagtttactgaaaaaattgagaagatgcaagaactacatgctgctgaaattttggacatggaatccagacatatttcagaaactgaaaccttaaagagggaacactatgttgccgttcagttactgaaagaggaatgtggtaccttgaaggcagtgatacagtgtctgagaagtaaagagggatcctcaattcctgagctagcacattctgatgcttaccagactagagaaatatgctccagtgattctggatcagactggggtcagggaatttatcttacacacagtcagggatttgacatagcatcagaaggccgaggagaagaaagtgaaagtgcaacagattcctttccaaagaaaataaagggattactgagagctgtccataatgaaggcatgcaggtgctttctctcactgagtctccctatagtgatggagaggaccattctattcagcaggtttcagaaccttggctagaagagagaaaagcttacatcaatacaatctcatctctaaaggatttaattacaaagatgcaactgcaaagagaagccgaggtttatgatagttctcaatctcatgagagcttctcagactggcgaggtgaactactgcttgcccttcaacaagttttcttagaagagcgtagtgttttactagcagcatttcggacggagctgacagctctaggtactacagatgcagttggtttactaaactgtttggaacagagaatacaagaacagggtgttgaatatcaagcagctatggaatgcctccagaaagcagatagaaggagtttgttatctgaaattcaggcactgcatgcacaaatgaatggtaggaaaattactctgaaaagagaacaagagagtgagaaaccaagccaagaactcttggaatataatatacagcagaagcagtctcaaatgctggagatgcaagtggagctcagcagtatgaaagacagagcaacggaactgcaggagcagctgagttctgagaaaatggtggttgctgaactgaagagtgagcttgcacaaactaaattggaactagaaacaacactcaaggcacagcataaacacctaaaagaattggaggctttcaggttggaagttaaagataagacagatgaagtacatttgcttaatgacacattagcaagtgaacagaaaaaatcaagagagctccagtgggctttggagaaagagaaagccaagttgggacgcagtgaagaacgggataaagaagaacttgaggatctgaagttttcacttgagagtcagaaacaaaggaatcttcagctaaatctacttttggaacaacagaaacaactactgaacgaatcccagcaaaaaatagaatcacagagaatgctatatgatgcccagttgtcagaagaacaaggtcgaaacttagagcttcaggtacttcttgaatctgagaaagttcgaattcgggaaatgagtagtaccctagatagggagcgggaattgcacgcacagctgcagagcagtgatggtactggacagtctcggccacccttgccctcagaggacctactgaaagagctgcagaaacagctagaggaaaaacacagtcgcatagtagaattgttaaatgagactgaaaaatataaactggattctttgcaaacacgacagcaaatggaaaaagataggcaggttcacaggaaaacactgcagacagaacaggaggccaacactgagggacagaaaaaaatgcatgagctccagtccaaagtggaagatcttcagcgccagctggaagagaaaagacaacaagtttataagttagaccttgaaggacagcgactacaaggaatcatgcaggaattccagaagcaagaactagaacgagaagaaaaacgagaaagtagaagaattctgtatcagaaccttaatgagccaaccacgtggagcttaaccagtgatagaactagaaattgggttcttcaacagaaaatagaaggagaaacaaaagaatcaaactacgctaaattgattgaaatgaatggaggaggaaccggctgtaatcatgaattagaaatgatcagacaaaagcttcaatgtgtagcttcaaaactacaggttctaccccagaaagcctctgagagactacagtttgaaacagcagatgatgaagatttcatttgggttcaggaaaatattgatgaaattattttacaactacagaaattaactggccagcaaggtgaagagcccagcttggtgtccccaagtacttcttgtggctcattgactgaaagactactgagacaaaatgctgagctgacagggcatatcagtcaactgactgaagagaagaatgacttaaggaacatggttatgaagctggaagagcagatcaggtggtatcgacagacaggagctggtagagataattcttccaggttttcattgaatggtggtgccaacattgaagccatcattgcctctgaaaaagaagtatggaacagagaaaaattgactctccagaaatctttgaaaagggcagaggctgaagtatacaaactgaaagctgaactaagaaatgactctttacttcaaactctgagccctgattctgaacatgtcactttaaagagaatttatggtaaatacttgagggcagaaagttttcgaaaggctctcatttaccagaagaaatacctgctgctgttactgggtgggttccaggaatgtgaagatgccaccttggccctgcttgcccggatgggggggcagccagctttcacggatctagaggtgatcaccaatcgcccaaagggcttcaccaggtttcggtcggccgtcagagtatccattgcaatttccagaatgaaatttttggttcgacggtggcatcgagtcacaggttctgtttccatcaatattaacagagatggctttggactgaatcaaggtgcagaaaagactgactcattttatcattcttctggtgggctggagttatatggagaaccaagacatactacgtatcgctcaagatcagatctggactatattaggtcccctttaccatttcagaataggtacccaggcactccagctgatttcaatcctggttctttagcatgttctcagcttcagaattacgatcctgacagagccctaacagattatatcactcggctagaggcactgcaaagacgacttggaactatacagtcaggttcaactactcaatttcatgctggcatgagaagataatcctttgaaacatcattaattgaagtgattttaaatagatttccttttgtaaatcaatggttcttttgtgcttttgtattgtgaatattcaatgggaccaatatgaacacagcttatgattgtatacaaatcccttgccagcacatgaaaacaaactggaatttgtatatataagcattgtgtatgtattcatgcacaataattattgaattacctgtatatttgtggaatgctaatttaaaacattaaattataaaccttgtgtatttatcaaatgggtgaaaagattaaacttttacgcattacaatactgctgaatgtgtagctcgaggtgtcctgcacttttcttataaggctactgaagttacatgttttgcctaatatattctactggtgatgaagacagataatatcacttgtagagacctatttttgtataatggtagaagttttgaattttatggggtattttgtcaagtactgaaataaaaatgacttcaccattttcaccacact

SEQ ID NO: 91 - protein, 3907 aa, Homo sapiens
MEDEERQKKLEAGKAKLAQFRQRKAQSDGQSPSKKQKKKRKTSSSKHDVSAHHDLNIDQSQCNEMYINSSQRVESTVIPESTIMRTLHSGEITSHEQGFSVELESEISTTADDCSSEVNGCSFVMRTGKPTNLLREEEFGVDDSYSEQGAQDSPTHLEMMESELAGKQHEIEELNRELEEMRVTYGTEGLQQLQEFEAAIKQRDGIITQLTANLQQARREKDETMREFLELTEQSQKLQIQFQQLQASETLRNSTHSSTAADLLQAKQQILTHQQQLEEQDHLLEDYQKKKEDFTMQISFLQEKIKVYEMEQDKKVENSNKEEIQEKETIIEELNTKIIEEEKKTLELKDKLTTADKLLGELQEQIVQKNQEIKNMKLELTNSKQKERQSSEEIKQLMGTVEELQKRNHKDSQFETDIVQRMEQETQRKLEQLRAELDEMYGQQIVQMKQELIRQHMAQMEEMKTRHKGEMENALRSYSNITVNEDQIKLMNVAINELNIKLQDTNSQKEKLKEELGLILEEKCALQRQLEDLVEELSFSREQIQRARQTIAEQESKLNEAHKSLSTVEDLKAEIVSASESRKELELKHEAEVTNYKIKLEMLEKEKNAVLDRMAESQEAELERLRTQLLFSHEEELSKLKEDLEIEHRINIEKLKDNLGIHYKQQIDGLQNEMSQKIETMQFEKDNLITKQNQLILEISKLKDLQQSLVNSKSEEMTLQINELQKEIEILRQEEKEKGTLEQEVQELQLKTELLEKQMKEKENDLQEKFAQLEAENSILKDEKKTLEDMLKIHTPVSQEERLIFLDSIKSKSKDSVWEKEIEILIEENEDLKQQCIQLNEEIEKQRNTFSFAEKNFEVNYQELQEEYACLLKVKDDLEDSKNKQELEYKSKLKALNEELHLQRINPTTVKMKSSVFDEDKTFVAETLEMGEVVEKDTTELMEKLEVTKREKLELSQRLSDLSEQLKQKHGEISFLNEEVKSLKQEKEQVSLRCRELEIIINHNRAENVQSCDTQVSSLLDGVVTMTSRGAEGSVSKVNKSFGEESKIMVEDKVSFENMTVGEESKQEQLILDHLPSVTKESSLRATQPSENDKLQKELNVLKSEQNDLRLQMEAQRICLSLVYSTHVDQVREYMENEKDKALCSLKEELIFAQEEKIKELQKIHQLELQTMKTQETGDEGKPLHLLIGKLQKAVSEECSYFLQTLCSVLGEYYTPALKCEVNAEDKENSGDYISENEDPELQDYRYEVQDFQENMHTLLNKVTEEYNKLLVLQTRLSKIWGQQTDGMKLEFGEENLPKEETEFLSIHSQMTNLEDIDVNHKSKLSSLQDLEKTKLEEQVQELESLISSLQQQLKETEQNYEAEIHCLQKRLQAVSESTVPPSLPVDSVVITESDAQRTMYPGSCVKKNIDGTIEFSGEFGVKEETNIVKLLEKQYQEQLEEEVAKVIVSMSIAFAQQTELSRISGGKENTASSKQAHAVCQQEQHYFNEMKLSQDQIGFQTFETVDVKFKEEFKPLSKELGEHGKEILLSNSDPHDIPESKDCVLTISEEMFSKDKTFIVRQSIHDEISVSSMDASRQLMLNEEQLEDMRQELVRQYQEHQQATELLRQAHMRQMERQREDQEQLQEEIKRLNRQLAQRSSIDNENLVSERERVLLEELEALKQLSLAGREKLCCELRNSSTQTQNGNENQGEVEEQTFKEKELDRKPEDVPPEILSNERYALQKANNRLLKILLEVVKTTAAVEETIGRHVLGILDRSSKSQSSASLIWRSEAEASVKSCVHEEHTRVTDESIPSYSGSDMPRNDINMWSKVTEEGTELSQRLVRSGFAGTEIDPENEELMLNISSRLQAAVEKLLEAISETSSQLEHAKVTQTELMRESFRQKQEATESLKCQEELRERLHEESRAREQLAVELSKAEGVIDGYADEKTLFERQIQEKTDIIDRLEQELLCASNRLQELEAEQQQIQEERELLSRQKEAMKAEAGPVEQQLLQETEKLMKEKLEVQCQAEKVRDDLQKQVKALEIDVEEQVSRFIELEQEKNTELMDLRQQNQALEKQLEKMRKFLDEQAIDREHERDVFQQEIQKLEQQLKVVPRFQPISEHQTREVEQLANHLKEKTDKCSELLLSKEQLQRDIQERNEEIEKLEFRVRELEQALLVSADTFQKVEDRKHFGAVEAKPELSLEVQLQAERDAIDRKEKEITNLEEQLEQFREELENKNEEVQQLHMQLEIQKKESTTRLQELEQENKLFKDDMEKLGLAIKESDAMSTQDQHVLFGKFAQIIQEKEVEIDQLNEQVTKLQQQLKITTDNKVIEEKNELIRDLETQIECLMSDQECVKRNREEEIEQLNEVIEKLQQELANIGQKTSMNAHSLSEEADSLKHQLDVVIAEKLALEQQVETANEEMTFMKNVLKETNFKMNQLTQELFSLKRERESVEKIQSIPENSVNVAIDHLSKDKPELEVVLTEDALKSLENQTYFKSFEENGKGSIINLETRLLQLESTVSAKDLELTQCYKQIKDMQEQGQFETEMLQKKIVNLQKIVEEKVAAALVSQIQLEAVQEYAKFCQDNQTISSEPERTNIQNLNQLREDELGSDISALTLRISELESQVVEMHTSLILEKEQVEIAEKNVLEKEKKLLELQKLLEGNEKKQREKEKKRSPQDVEVLKTTTELFHSNEESGFFNELEALRAESVATKAELASYKEKAEKLQEELLVKETNMTSLQKDLSQVRDHLAEAKEKLSILEKEDETEVQESKKACMFEPLPIKLSKSIASQTDGTLKISSSNQTPQILVKNAGIQINLQSECSSEEVTEIISQFTEKIEKMQELHAAEILDMESRHISETETLKREHYVAVQLLKEECGTLKAVIQCLRSKEGSSIPELAHSDAYQTREICSSDSGSDWGQGIYLTHSQGFDIASEGRGEESESATDSFPKKIKGLLRAVHNEGMQVLSLTESPYSDGEDHSIQQVSEPWLEERKAYINTISSLKDLITKMQLQREAEVYDSSQSHESFSDWRGELLLALQQVFLEERSVLLAAFRTELTALGTTDAVGLLNCLEQRIQEQGVEYQAAMECLQKADRRSLLSEIQALHAQMNGRKITLKREQESEKPSQELLEYNIQQKQSQMLEMQVELSSMKDRATELQEQLSSEKMVVAELKSELAQTKLELETTLKAQHKHLKELEAFRLEVKDKTDEVHLLNDTLASEQKKSRELQWALEKEKAKLGRSEERDKEELEDLKFSLESQKQRNLQLNLLLEQQKQLLNESQQKIESQRMLYDAQLSEEQGRNLELQVLLESEKVRIREMSSTLDRERELHAQLQSSDGTGQSRPPLPSEDLLKELQKQLEEKHSRIVELLNETEKYKLDSLQTRQQMEKDRQVHRKTLQTEQEANTEGQKKMHELQSKVEDLQRQLEEKRQQVYKLDLEGQRLQGIMQEFQKQELEREEKRESRRILYQNLNEPTTWSLTSDRTRNWVLQQKIEGETKESNYAKLIEMNGGGTGCNHELEMIRQKLQCVASKLQVLPQKASERLQFETADDEDFIWVQENIDEIILQLQKLTGQQGEEPSLVSPSTSCGSLTERLLRQNAELTGHISQLTEEKNDLRNMVMKLEEQIRWYRQTGAGRDNSSRFSLNGGANIEAIIASEKEVWNREKLTLQKSLKRAEAEVYKLKAELRNDSLLQTLSPDSEHVTLKRIYGKYLRAESFRKALIYQKKYLLLLLGGFQECEDATLALLARMGGQPAFTDLEVITNRPKGFTRFRSAVRVSIAISRMKFLVRRWHRVTGSVSININRDGFGLNQGAEKTDSFYHSSGGLELYGEPRHTTYRSRSDLDYIRSPLPFQNRYPGTPADFNPGSLACSQLQNYDPDRALTDYITRLEALQRRLGTIQSGSTTQFHAGMRR

SEQ ID NO: 92 - DNA, 12474 bp, Homo sapiens
gaagatggcggcggcggcggcggtgacggcgcttcccgtgcggctgaggacgatccgccagtgagcgcggagactgcttccacttcgggcgggggagcgccggaccgaatcggctctctaggccgtggagcttgccgtcccacctccgtccaaatcgacctttcctttctatccccaaccacccctcaacccctgttttcccctgccttccttgcagaggccatggaggacgaggagagacagaagaagctggaggccggcaaagccaagattgaagaactctctttagcttttcttgtcagacagcttgcccagtttcgacaaagaaaagctcagtcggatgggcagagtccttccaagaagcagaaaaaaaagagaaaaacgtcaagcagtaaacatgatgtgtcagcacaccatgatttgaatattgatcaatcacagtgtaatgaaatgtacataaatagttctcagagagtagaatcaactgtgattcctgaatctacaataatgagaactctacatagtggagaaataaccagtcatgagcagggcttctctgtggaactggaaagtgaaatttcaaccacagcagatgactgcagttcagaggtaaatggttgcagttttgtgatgagaacaggaaagcctacaaatttattaagggaagaagaatttggtgttgatgattcttattctgaacaaggagcacaagacagtccgactcatctagagatgatggaaagtgagttggctgggaagcagcatgagattgaagagctaaacagagagctggaagaaatgagggttacctatgggactgaaggactgcagcagttacaagaatttgaagctgccattaaacaaagagatggcattataacccagctcactgctaatttacaacaagcaagaagagaaaaggatgagacaatgagagaatttttagagttgacagaacagagtcaaaaattacagattcaatttcagcaattacaggctagtgaaactctgagaaacagcactcatagtagcacagctgcagacttactacaagccaaacaacagatcctcactcatcaacagcagcttgaagaacaagaccacttattagaagattatcagaaaaagaaagaagacttcacaatgcaaattagtttcttgcaagagaaaattaaagtatatgaaatggaacaagataaaaaagtagaaaactcaaataaagaagaaatacaggaaaaggagacaatcattgaagaattaaacacaaaaataatagaagaagaaaagaaaactcttgagctaaaggataaattaacaactgctgataaattactaggagaattacaagaacagattgtgcaaaagaaccaagaaataaaaaacatgaaattagagctgactaattctaagcaaaaagaaagacagtcttctgaagaaataaaacagttaatggggacagtcgaagaacttcagaagagaaatcataaagacagccagttcgaaactgatatagtacaacgaatggaacaagaaacacaaagaaagttagaacaactccgggcagagctggatgagatgtatgggcagcagatagtgcaaatgaaacaagaattaataagacaacacatggcacagatggaggaaatgaaaacacggcataagggagaaatggagaatgctttaaggtcatattcaaatattacagttaatgaagatcagataaagttaatgaatgtggcaataaatgaactgaatataaaattgcaagatactaactctcaaaaggaaaaactcaaggaagaactaggactaattttagaagaaaagtgtgctctacagagacagcttgaagaccttgttgaagaattgagcttttcaagggaacagattcagagagctagacagacaatagctgaacaagaaagtaaacttaatgaagcacataagtcccttagtacagtggaagatttgaaagctgagattgtttctgcatctgaatccagaaaggaactagaattaaaacatgaagcagaagttacaaattacaagataaaacttgaaatgttagaaaaagaaaagaatgctgtgttagacagaatggctgaatcacaagaagctgaattagagaggctgagaacacagcttctatttagtcacgaagaagagctttccaaactgaaggaagatttagaaattgaacatcgaataaatattgaaaaacttaaagataatttaggcattcactataaacagcagatagatggtttacagaatgaaatgagtcaaaagatagaaaccatgcagtttgaaaaggacaatttgataactaagcagaatcaattaattttggaaatttcaaagctaaaagatttacagcagtctcttgtaaattcaaagtcagaagaaatgactcttcaaatcaatgaacttcaaaaagaaattgaaatactcagacaagaagaaaaagaaaagggtacacttgaacaagaagttcaagaattacaacttaaaacagaattgttagaaaaacagatgaaggaaaaagagaatgatcttcaagaaaaatttgcacaacttgaagcagagaatagcattcttaaagatgaaaagaaaacccttgaagacatgttgaaaatacatactcctgttagccaagaagaaagattgattttcttagactccattaagtccaaatccaaagactctgtgtgggaaaaagaaatagaaatacttatagaggaaaatgaggacctcaaacaacaatgtattcagctaaatgaagagattgaaaagcaaaggaacactttttcatttgctgaaaaaaactttgaagttaactatcaagagttacaagaggagtatgcttgccttctcaaagtaaaagatgatttagaagacagtaaaaataaacaggaattagagtataaaagtaaacttaaagcacttaatgaagagcttcatttgcaaagaataaatccaactacagtgaaaatgaaaagttctgtctttgatgaagacaaaacttttgtagcagaaacattggaaatgggtgaggttgttgaaaaggatacaacagaactcatggaaaaacttgaggtaaccaagcgagagaaattagagctgtcacagagactgtctgatctttctgaacaattgaaacagaaacatggtgagattagttttctaaatgaagaagttaaatctttaaagcaagagaaagaacaagtttcattgagatgtagagagctagaaatcattattaaccacaacagggcagaaaatgtacagtcatgtgatactcaagtaagctctttattagatggagttgtgaccatgacaagcaggggtgctgaaggatcagtttctaaagtaaataaaagttttggtgaagaatcaaaaataatggtggaagataaagtttcttttgaaaatatgactgttggagaagaaagtaagcaagaacagttgattttggatcacttaccatctgtaacaaaggaatcatcacttagagcaactcaaccaagtgaaaatgataaacttcagaaagaactcaatgtacttaaatcagaacagaatgatttaaggctacagatggaagcccaacgcatttgcctctctctggtttattcaactcatgtggatcaggttcgtgaatatatggaaaatgaaaaagataaagctctttgcagtcttaaagaagagcttatttttgctcaagaggaaaagatcaaggaacttcagaaaatacaccagttagaactacagactatgaaaacacaagaaacaggtgatgaaggaaagcctttacatctgctcattggaaaacttcaaaaggcagtgtctgaagaatgttcttattttttacagactttatgcagtgtccttggtgaatattatactcctgctttaaaatgtgaagtaaatgcagaagacaaagagaattctggtgattacatttctgaaaatgaagatccagaattacaagattatagatatgaagttcaagactttcaagaaaatatgcacactcttctcaacaaagtaacagaagaatacaacaaactcttggtacttcaaacacgactaagcaagatctggggacagcagacagatggtatgaaacttgaatttggagaagaaaaccttccaaaagaggaaacagagtttttatcaatccattctcagatgaccaatttggaagacattgatgtcaatcataaaagcaagttatcttctctgcaagatcttgaaaaaactaaacttgaagaacaagttcaagaattagaaagcctcatatcctctttgcagcaacagttgaaagaaactgaacaaaactatgaggcagagatccactgtttacagaagaggcttcaagctgttagtgagtccacggttccgccaagcttacctgttgattcggtggtaattacagaatctgatgcacagagaacaatgtaccctggaagttgtgtgaaaaagaatattgatggtacaatagagttttctggtgaatttggagtgaaagaggaaacaaatatcgttaagttgcttgaaaaacaataccaagaacaattagaagaagaagtagctaaggttattgtgtcaatgagtatagcatttgctcaacaaactgaactgtctagaatatctgggggaaaagaaaatactgcatcatcaaagcaagcacatgctgtgtgtcagcaagaacaacattattttaatgaaatgaaattatcacaggatcaaattggttttcagacttttgagacagtggatgtgaaatttaaagaagaatttaaaccacttagtaaagagttaggagaacatggaaaggaaattttattatcaaatagtgatccccatgatataccagaatcaaaggactgtgtgctgactatttcagaagaaatgttctccaaagataaaacatttatagttagacagtctattcatgatgagatttcagtgtcaagcatggatgcttctagacaactaatgttgaatgaagaacagttggaagatatgagacaggaacttgtacgacaataccaagaacatcaacaggcaacggaattgttaaggcaagcacatatgcggcaaatggagagacagcgagaagaccaggaacagctacaagaagagattaagagacttaatagacaattagcccagagatcctccatagataatgaaaacctggtttcagagagagagagggtgcttttagaggagctggaagcactaaagcagctgtctttagctggaagagagaagctgtgttgtgagctgcgcaacagcagtacgcaaacacagaatggaaatgaaaaccaaggagaagttgaagaacaaacatttaaagaaaaggaattagacagaaaacctgaagatgtgcctcctgagattttgtctaatgaaaggtatgcactccagaaagctaataatagacttttgaagatcctcttagaagttgtaaagacaacagcagctgttgaagaaacaattggtcgccatgtccttgggattctagatagatctagtaaaagccagtcatctgccagcctaatttggaggtcagaagcagaggcatctgtaaagtcatgtgtccatgaggaacatacaagagttacagatgaatccattccctcttattctggaagtgatatgccaagaaatgacattaacatgtggtcaaaagtaactgaggaaggaacagagctgtcacaacgacttgtgaggagtggttttgctggaactgaaatagaccctgaaaatgaagaacttatgctgaacattagctctcgactacaagcagcagttgaaaaactcctagaagccataagtgaaactagcagtcagcttgaacatgcgaaagtgacacagacagagttgatgcgtgagtcatttagacagaaacaagaagcaacagagtcccttaagtgccaagaggaacttcgagagcgccttcatgaggagtccagggccagagaacagctagctgtggagctcagtaaggctgagggcgtcattgatggctatgcagatgaaaaaactctttttgaaaggcaaattcaggaaaaaactgatataatagatcgtcttgagcaggagttgttatgtgcaagtaacaggttgcaagaattggaggcagagcaacagcagatccaagaagaaagagaattactgtccagacaaaaggaagctatgaaagcagaggcaggcccagttgaacaacaattactacaggagacagaaaaattaatgaaggaaaaactagaagtacaatgtcaagctgaaaaagtacgtgatgaccttcaaaaacaagtgaaagctctagaaatagatgtggaagaacaagtcagtaggtttatagagctggaacaagaaaaaaatactgaactaatggatttaagacagcaaaaccaagcattggaaaagcagttagaaaaaatgagaaaatttttagatgagcaagccattgacagagaacatgagagagatgtattccaacaggaaatacagaaactagaacagcaacttaaggttgttcctcgattccagcctatcagtgaacatcaaactagagaggttgaacagttagcaaatcatctgaaagaaaaaacagacaaatgcagtgagcttttgctctctaaagagcagcttcaaagggatatacaagaaaggaatgaagaaatagagaaactggagttcagagtaagagaactggagcaggcgcttcttgtgagtgcagatacttttcaaaaggtagaggaccgaaaacactttggagctgtagaagctaaaccagaattgtccctagaagtacaattgcaggctgaacgagatgccatagacagaaaggaaaaagagattacaaacttagaagagcaattagaacagtttagagaagaactggaaaataagaatgaagaagttcaacaattacatatgcaattagaaatacagaaaaaggaatctactacccgcctacaagaacttgaacaggaaaacaaattatttaaggatgacatggagaaactgggacttgccataaaggaatctgatgccatgtctactcaagaccaacatgtgctatttgggaaatttgctcaaataatacaggaaaaagaggtagaaattgaccaattaaatgaacaagttacgaaactccagcagcaacttaaaattacaacagataacaaggttattgaagaaaaaaatgaactgataagggatcttgaaacccaaatagaatgtttgatgagtgatcaagaatgtgtgaagagaaatagagaagaagaaatagagcagctcaatgaagtgattgaaaaacttcaacaggaattggcaaatattggacagaagacatcaatgaatgctcattccctctcagaagaagcagacagtttaaaacatcaattggatgtggttatagctgaaaagctggccttggaacagcaagtagaaaccgctaatgaagaaatgaccttcatgaaaaatgtacttaaagaaaccaattttaaaatgaatcagctaacacaggaattattcagcttaaagagagaacgtgaaagtgtggaaaagattcaaagcataccagagaatagtgttaacgtggctatagatcatctgagcaaagacaaacctgaactagaagtagtccttacagaggatgctcttaaatccctagaaaatcagacatacttcaaatcttttgaagaaaatggcaaaggttccataattaatttggaaacaaggttgctacaacttgagagcactgttagtgcaaaggacttagaacttacccagtgttataaacaaataaaagacatgcaagaacaaggccagtttgaaacagaaatgcttcaaaagaagattgtaaacctacagaaaatagttgaagaaaaagtggctgctgctcttgtcagtcaaatccaacttgaggcagttcaggaatatgcaaaattctgtcaagataatcaaacaatttcatcagaacctgaaagaacaaatattcagaatttaaatcaactaagagaagatgagttggggtcagatatatcagcattaaccttgagaatatcagaattagaaagccaggttgttgaaatgcatactagtttgattttagaaaaagaacaagtagaaattgcagaaaaaaatgttttagaaaaagaaaagaagctgctagaactacagaagctattggagggcaatgagaaaaaacagagagagaaagaaaagaaaagaagccctcaagatgttgaagttctcaagacaactactgagctatttcatagcaatgaagaaagtggattttttaatgaactcgaggctcttagagctgaatcagtggctaccaaagcagaacttgccagttataaagaaaaggctgaaaaacttcaagaagagcttttggtaaaagaaacaaatatgacatctcttcagaaagacttaagccaagttagggatcacctcgcagaggcaaaagagaaattgtccattttagaaaaagaagatgagactgaggtacaagaaagcaaaaaggcctgcatgtttgagccacttcctataaaactgagtaagagcattgcatcccagacagatgggactctgaagatcagtagcagcaatcagactccacaaattcttgttaaaaatgcaggaatacaaattaatttacagagtgaatgttcctcagaagaagttactgaaataatcagtcagtttactgaaaaaattgagaagatgcaagaactacatgctgctgaaattttggacatggaatccagacatatttcagaaactgaaaccttaaagagggaacactatgttgccgttcagttactgaaagaggaatgtggtaccttgaaggcagtgatacagtgtctgagaagtaaagaggtatttggtttttataatatgtgtttttcaacattgtgtgattctggatcagactggggtcagggaatttatcttacacacagtcagggatttgacatagcatcagaaggccgaggagaagaaagtgaaagtgcaacagattcctttccaaagaaaataaagggattactgagagctgtccataatgaaggcatgcaggtgctttctctcactgagtctccctatagtgatggagaggaccattctattcagcaggtttcagaaccttggctagaagagagaaaagcttacatcaatacaatctcatctctaaaggatttaattacaaagatgcaactgcaaagagaagccgaggtttatgatagttctcaatctcatgagagcttctcagactggcgaggtgaactactgcttgcccttcaacaagttttcttagaagagcgtagtgttttactagcagcatttcggacggagctgacagctctaggtactacagatgcagttggtttactaaactgtttggaacagagaatacaagaacagggtgttgaatatcaagcagctatggaatgcctccagaaagcagatagaaggagtttgttatctgaaattcaggcactgcatgcacaaatgaatggtaggaaaattactctgaaaagagaacaagagagtgagaaaccaagccaagaactcttggaatataatatacagcagaagcagtctcaaatgctggagatgcaagtggagctcagcagtatgaaagacagagcaacggaactgcaggagcagctgagttctgagaaaatggtggttgctgaactgaagagtgagcttgcacaaactaaattggaactagaaacaacactcaaggcacagcataaacacctaaaagaattggaggctttcaggttggaagttaaagataagacagatgaagtacatttgcttaatgacacattagcaagtgaacagaaaaaatcaagagagctccagtgggctttggagaaagagaaagccaagttgggacgcagtgaagaacgggataaagaagaacttgaggatctgaagttttcacttgagagtcagaaacaaaggaatcttcagctaaatctacttttggaacaacagaaacaactactgaacgaatcccagcaaaaaatagaatcacagagaatgctatatgatgcccagttgtcagaagaacaaggtcgaaacttagagcttcaggtacttcttgaatctgagaaagttcgaattcgggaaatgagtagtaccctagatagggagcgggaattgcacgcacagctgcagagcagtgatggtactggacagtctcggccacccttgccctcagaggacctactgaaagagctgcagaaacagctagaggaaaaacacagtcgcatagtagaattgttaaatgagactgaaaaatataaactggattctttgcaaacacgacagcaaatggaaaaagataggcaggttcacaggaaaacactgcagacagaacaggaggccaacactgagggacagaaaaaaatgcatgagctccagtccaaagtggaagatcttcagcgccagctggaagagaaaagacaacaagtttataagttagaccttgaaggacagcgactacaaggaatcatgcaggaattccagaagcaagaactagaacgagaagaaaaacgagaaagtagaagaattctgtatcagaaccttaatgagccaaccacgtggagcttaaccagtgatagaactagaaattgggttcttcaacagaaaatagaaggagaaacaaaagaatcaaactacgctaaattgattgaaatgaatggaggaggaaccggctgtaatcatgaattagaaatgatcagacaaaagcttcaatgtgtagcttcaaaactacaggttctaccccagaaagcctctgagagactacagtttgaaacagcagatgatgaagatttcatttgggttcaggaaaatattgatgaaattattttacaactacagaaattaactggccagcaaggtgaagagcccagcttggtgtccccaagtacttcttgtggctcattgactgaaagactactgagacaaaatgctgagctgacagggcatatcagtcaactgactgaagagaagaatgacttaaggaacatggttatgaagctggaagagcagatcaggtggtatcgacagacaggagctggtagagataattcttccaggttttcattgaatggtggtgccaacattgaagccatcattgcctctgaaaaagaagtatggaacagagaaaaattgactctccagaaatctttgaaaagggcagaggctgaagtatacaaactgaaagctgaactaagaaatgactctttacttcaaactctgagccctgattctgaacatgtcactttaaagagaatttatggtaaatacttgagggcagaaagttttcgaaaggctctcatttaccagaagaaatacctgctgctgttactgggtgggttccaggaatgtgaagatgccaccttggccctgcttgcccggatgggggggcagccagctttcacggatctagaggtgatcaccaatcgcccaaagggcttcaccaggtttcggtcggccgtcagagtatccattgcaatttccagaatgaaatttttggttcgacggtggcatcgagtcacaggttctgtttccatcaatattaacagagatggctttggactgaatcaaggtgcagaaaagactgactcattttatcattcttctggtgggctggagttatatggagaaccaagacatactacgtatcgctcaagatcagatctggactatattaggtcccctttaccatttcagaataggtacccaggcactccagctgatttcaatcctggttctttagcatgttctcagcttcagaattacgatcctgacagagccctaacagattatatcactcggctagaggcactgcaaagacgacttggaactatacagtcaggttcaactactcaatttcatgctggcatgagaagataatcctttgaaacatcattaattgaagtgattttaaatagatttccttttgtaaatcaatggttcttttgtgcttttgtattgtgaatattcaatgggaccaatatgaacacagcttatgattgtatacaaatcccttgccagcacatgaaaacaaactggaatttgtatatataagcattgtgtatgtattcatgcacaataattattgaattacctgtatatttgtggaatgctaatttaaaacattaaattataaaccttgtgtatttatcaaatgggtgaaaagattaaacttttacgcattacaatactgctgaatgtgtagctcgaggtgtcctgcacttttcttataaggctactgaagttacatgttttgcctaatatattctactggtgatgaagacagataatatcacttgtagagacctatttttgtataatggtagaagttttgaattttatggggtattttgtcaagtactgaaataaaaatgacttcaccattttcaccacact

SEQ ID NO: 93 - DNA, 12450 bp, Homo sapiens
gaagatggcggcggcggcggcggtgacggcgcttcccgtgcggctgaggacgatccgccagtgagcgcggagactgcttccacttcgggcgggggagcgccggaccgaatcggctctctaggccgtggagcttgccgtcccacctccgtccaaatcgacctttcctttctatccccaaccacccctcaacccctgttttcccctgccttccttgcagaggccatggaggacgaggagagacagaagaagctggaggccggcaaagccaagcttgcccagtttcgacaaagaaaagctcagtcggatgggcagagtccttccaagaagcagaaaaaaaagagaaaaacgtcaagcagtaaacatgatgtgtcagcacaccatgatttgaatattgatcaatcacagtgtaatgaaatgtacataaatagttctcagagagtagaatcaactgtgattcctgaatctacaataatgagaactctacatagtggagaaataaccagtcatgagcagggcttctctgtggaactggaaagtgaaatttcaaccacagcagatgactgcagttcagaggtaaatggttgcagttttgtgatgagaacaggaaagcctacaaatttattaagggaagaagaatttggtgttgatgattcttattctgaacaaggagcacaagacagtccgactcatctagagatgatggaaagtgagttggctgggaagcagcatgagattgaagagctaaacagagagctggaagaaatgagggttacctatgggactgaaggactgcagcagttacaagaatttgaagctgccattaaacaaagagatggcattataacccagctcactgctaatttacaacaagcaagaagagaaaaggatgagacaatgagagaatttttagagttgacagaacagagtcaaaaattacagattcaatttcagcaattacaggctagtgaaactctgagaaacagcactcatagtagcacagctgcagacttactacaagccaaacaacagatcctcactcatcaacagcagcttgaagaacaagaccacttattagaagattatcagaaaaagaaagaagacttcacaatgcaaattagtttcttgcaagagaaaattaaagtatatgaaatggaacaagataaaaaagtagaaaactcaaataaagaagaaatacaggaaaaggagacaatcattgaagaattaaacacaaaaataatagaagaagaaaagaaaactcttgagctaaaggataaattaacaactgctgataaattactaggagaattacaagaacagattgtgcaaaagaaccaagaaataaaaaacatgaaattagagctgactaattctaagcaaaaagaaagacagtcttctgaagaaataaaacagttaatggggacagtcgaagaacttcagaagagaaatcataaagacagccagttcgaaactgatatagtacaacgaatggaacaagaaacacaaagaaagttagaacaactccgggcagagctggatgagatgtatgggcagcagatagtgcaaatgaaacaagaattaataagacaacacatggcacagatggaggaaatgaaaacacggcataagggagaaatggagaatgctttaaggtcatattcaaatattacagttaatgaagatcagataaagttaatgaatgtggcaataaatgaactgaatataaaattgcaagatactaactctcaaaaggaaaaactcaaggaagaactaggactaattttagaagaaaagtgtgctctacagagacagcttgaagaccttgttgaagaattgagcttttcaagggaacagattcagagagctagacagacaatagctgaacaagaaagtaaacttaatgaagcacataagtcccttagtacagtggaagatttgaaagctgagattgtttctgcatctgaatccagaaaggaactagaattaaaacatgaagcagaagttacaaattacaagataaaacttgaaatgttagaaaaagaaaagaatgctgtgttagacagaatggctgaatcacaagaagctgaattagagaggctgagaacacagcttctatttagtcacgaagaagagctttccaaactgaaggaagatttagaaattgaacatcgaataaatattgaaaaacttaaagataatttaggcattcactataaacagcagatagatggtttacagaatgaaatgagtcaaaagatagaaaccatgcagtttgaaaaggacaatttgataactaagcagaatcaattaattttggaaatttcaaagctaaaagatttacagcagtctcttgtaaattcaaagtcagaagaaatgactcttcaaatcaatgaacttcaaaaagaaattgaaatactcagacaagaagaaaaagaaaagggtacacttgaacaagaagttcaagaattacaacttaaaacagaattgttagaaaaacagatgaaggaaaaagagaatgatcttcaagaaaaatttgcacaacttgaagcagagaatagcattcttaaagatgaaaagaaaacccttgaagacatgttgaaaatacatactcctgttagccaagaagaaagattgattttcttagactccattaagtccaaatccaaagactctgtgtgggaaaaagaaatagaaatacttatagaggaaaatgaggacctcaaacaacaatgtattcagctaaatgaagagattgaaaagcaaaggaacactttttcatttgctgaaaaaaactttgaagttaactatcaagagttacaagaggagtatgcttgccttctcaaagtaaaagatgatttagaagacagtaaaaataaacaggaattagagtataaaagtaaacttaaagcacttaatgaagagcttcatttgcaaagaataaatccaactacagtgaaaatgaaaagttctgtctttgatgaagacaaaacttttgtagcagaaacattggaaatgggtgaggttgttgaaaaggatacaacagaactcatggaaaaacttgaggtaaccaagcgagagaaattagagctgtcacagagactgtctgatctttctgaacaattgaaacagaaacatggtgagattagttttctaaatgaagaagttaaatctttaaagcaagagaaagaacaagtttcattgagatgtagagagctagaaatcattattaaccacaacagggcagaaaatgtacagtcatgtgatactcaagtaagctctttattagatggagttgtgaccatgacaagcaggggtgctgaaggatcagtttctaaagtaaataaaagttttggtgaagaatcaaaaataatggtggaagataaagtttcttttgaaaatatgactgttggagaagaaagtaagcaagaacagttgattttggatcacttaccatctgtaacaaaggaatcatcacttagagcaactcaaccaagtgaaaatgataaacttcagaaagaactcaatgtacttaaatcagaacagaatgatttaaggctacagatggaagcccaacgcatttgcctctctctggtttattcaactcatgtggatcaggttcgtgaatatatggaaaatgaaaaagataaagctctttgcagtcttaaagaagagcttatttttgctcaagaggaaaagatcaaggaacttcagaaaatacaccagttagaactacagactatgaaaacacaagaaacaggtgatgaaggaaagcctttacatctgctcattggaaaacttcaaaaggcagtgtctgaagaatgttcttattttttacagactttatgcagtgtccttggtgaatattatactcctgctttaaaatgtgaagtaaatgcagaagacaaagagaattctggtgattacatttctgaaaatgaagatccagaattacaagattatagatatgaagttcaagactttcaagaaaatatgcacactcttctcaacaaagtaacagaagaatacaacaaactcttggtacttcaaacacgactaagcaagatctggggacagcagacagatggtatgaaacttgaatttggagaagaaaaccttccaaaagaggaaacagagtttttatcaatccattctcagatgaccaatttggaagacattgatgtcaatcataaaagcaagttatcttctctgcaagatcttgaaaaaactaaacttgaagaacaagttcaagaattagaaagcctcatatcctctttgcagcaacagttgaaagaaactgaacaaaactatgaggcagagatccactgtttacagaagaggcttcaagctgttagtgagtccacggttccgccaagcttacctgttgattcggtggtaattacagaatctgatgcacagagaacaatgtaccctggaagttgtgtgaaaaagaatattgatggtacaatagagttttctggtgaatttggagtgaaagaggaaacaaatatcgttaagttgcttgaaaaacaataccaagaacaattagaagaagaagtagctaaggttattgtgtcaatgagtatagcatttgctcaacaaactgaactgtctagaatatctgggggaaaagaaaatactgcatcatcaaagcaagcacatgctgtgtgtcagcaagaacaacattattttaatgaaatgaaattatcacaggatcaaattggttttcagacttttgagacagtggatgtgaaatttaaagaagaatttaaaccacttagtaaagagttaggagaacatggaaaggaaattttattatcaaatagtgatccccatgatataccagaatcaaaggactgtgtgctgactatttcagaagaaatgttctccaaagataaaacatttatagttagacagtctattcatgatgagatttcagtgtcaagcatggatgcttctagacaactaatgttgaatgaagaacagttggaagatatgagacaggaacttgtacgacaataccaagaacatcaacaggcaacggaattgttaaggcaagcacatatgcggcaaatggagagacagcgagaagaccaggaacagctacaagaagagattaagagacttaatagacaattagcccagagatcctccatagataatgaaaacctggtttcagagagagagagggtgcttttagaggagctggaagcactaaagcagctgtctttagctggaagagagaagctgtgttgtgagctgcgcaacagcagtacgcaaacacagaatggaaatgaaaaccaaggagaagttgaagaacaaacatttaaagaaaaggaattagacagaaaacctgaagatgtgcctcctgagattttgtctaatgaaaggtatgcactccagaaagctaataatagacttttgaagatcctcttagaagttgtaaagacaacagcagctgttgaagaaacaattggtcgccatgtccttgggattctagatagatctagtaaaagccagtcatctgccagcctaatttggaggtcagaagcagaggcatctgtaaagtcatgtgtccatgaggaacatacaagagttacagatgaatccattccctcttattctggaagtgatatgccaagaaatgacattaacatgtggtcaaaagtaactgaggaaggaacagagctgtcacaacgacttgtgaggagtggttttgctggaactgaaatagaccctgaaaatgaagaacttatgctgaacattagctctcgactacaagcagcagttgaaaaactcctagaagccataagtgaaactagcagtcagcttgaacatgcgaaagtgacacagacagagttgatgcgtgagtcatttagacagaaacaagaagcaacagagtcccttaagtgccaagaggaacttcgagagcgccttcatgaggagtccagggccagagaacagctagctgtggagctcagtaaggctgagggcgtcattgatggctatgcagatgaaaaaactctttttgaaaggcaaattcaggaaaaaactgatataatagatcgtcttgagcaggagttgttatgtgcaagtaacaggttgcaagaattggaggcagagcaacagcagatccaagaagaaagagaattactgtccagacaaaaggaagctatgaaagcagaggcaggcccagttgaacaacaattactacaggagacagaaaaattaatgaaggaaaaactagaagtacaatgtcaagctgaaaaagtacgtgatgaccttcaaaaacaagtgaaagctctagaaatagatgtggaagaacaagtcagtaggtttatagagctggaacaagaaaaaaatactgaactaatggatttaagacagcaaaaccaagcattggaaaagcagttagaaaaaatgagaaaatttttagatgagcaagccattgacagagaacatgagagagatgtattccaacaggaaatacagaaactagaacagcaacttaaggttgttcctcgattccagcctatcagtgaacatcaaactagagaggttgaacagttagcaaatcatctgaaagaaaaaacagacaaatgcagtgagcttttgctctctaaagagcagcttcaaagggatatacaagaaaggaatgaagaaatagagaaactggagttcagagtaagagaactggagcaggcgcttcttgtagaggaccgaaaacactttggagctgtagaagctaaaccagaattgtccctagaagtacaattgcaggctgaacgagatgccatagacagaaaggaaaaagagattacaaacttagaagagcaattagaacagtttagagaagaactggaaaataagaatgaagaagttcaacaattacatatgcaattagaaatacagaaaaaggaatctactacccgcctacaagaacttgaacaggaaaacaaattatttaaggatgacatggagaaactgggacttgccataaaggaatctgatgccatgtctactcaagaccaacatgtgctatttgggaaatttgctcaaataatacaggaaaaagaggtagaaattgaccaattaaatgaacaagttacgaaactccagcagcaacttaaaattacaacagataacaaggttattgaagaaaaaaatgaactgataagggatcttgaaacccaaatagaatgtttgatgagtgatcaagaatgtgtgaagagaaatagagaagaagaaatagagcagctcaatgaagtgattgaaaaacttcaacaggaattggcaaatattggacagaagacatcaatgaatgctcattccctctcagaagaagcagacagtttaaaacatcaattggatgtggttatagctgaaaagctggccttggaacagcaagtagaaaccgctaatgaagaaatgaccttcatgaaaaatgtacttaaagaaaccaattttaaaatgaatcagctaacacaggaattattcagcttaaagagagaacgtgaaagtgtggaaaagattcaaagcataccagagaatagtgttaacgtggctatagatcatctgagcaaagacaaacctgaactagaagtagtccttacagaggatgctcttaaatccctagaaaatcagacatacttcaaatcttttgaagaaaatggcaaaggttccataattaatttggaaacaaggttgctacaacttgagagcactgttagtgcaaaggacttagaacttacccagtgttataaacaaataaaagacatgcaagaacaaggccagtttgaaacagaaatgcttcaaaagaagattgtaaacctacagaaaatagttgaagaaaaagtggctgctgctcttgtcagtcaaatccaacttgaggcagttcaggaatatgcaaaattctgtcaagataatcaaacaatttcatcagaacctgaaagaacaaatattcagaatttaaatcaactaagagaagatgagttggggtcagatatatcagcattaaccttgagaatatcagaattagaaagccaggttgttgaaatgcatactagtttgattttagaaaaagaacaagtagaaattgcagaaaaaaatgttttagaaaaagaaaagaagctgctagaactacagaagctattggagggcaatgagaaaaaacagagagagaaagaaaagaaaagaagccctcaagatgttgaagttctcaagacaactactgagctatttcatagcaatgaagaaagtggattttttaatgaactcgaggctcttagagctgaatcagtggctaccaaagcagaacttgccagttataaagaaaaggctgaaaaacttcaagaagagcttttggtaaaagaaacaaatatgacatctcttcagaaagacttaagccaagttagggatcacctcgcagaggcaaaagagaaattgtccattttagaaaaagaagatgagactgaggtacaagaaagcaaaaaggcctgcatgtttgagccacttcctataaaactgagtaagagcattgcatcccagacagatgggactctgaagatcagtagcagcaatcagactccacaaattcttgttaaaaatgcaggaatacaaattaatttacagagtgaatgttcctcagaagaagttactgaaataatcagtcagtttactgaaaaaattgagaagatgcaagaactacatgctgctgaaattttggacatggaatccagacatatttcagaaactgaaaccttaaagagggaacactatgttgccgttcagttactgaaagaggaatgtggtaccttgaaggcagtgatacagtgtctgagaagtaaagagggatcctcaattcctgagctagcacattctgatgcttaccagactagagaaatatgctccagtgattctggatcagactggggtcagggaatttatcttacacacagtcagggatttgacatagcatcagaaggccgaggagaagaaagtgaaagtgcaacagattcctttccaaagaaaataaagggattactgagagctgtccataatgaaggcatgcaggtgctttctctcactgagtctccctatagtgatggagaggaccattctattcagcaggtttcagaaccttggctagaagagagaaaagcttacatcaatacaatctcatctctaaaggatttaattacaaagatgcaactgcaaagagaagccgaggtttatgatagttctcaatctcatgagagcttctcagactggcgaggtgaactactgcttgcccttcaacaagttttcttagaagagcgtagtgttttactagcagcatttcggacggagctgacagctctaggtactacagatgcagttggtttactaaactgtttggaacagagaatacaagaacagggtgttgaatatcaagcagctatggaatgcctccagaaagcagatagaaggagtttgttatctgaaattcaggcactgcatgcacaaatgaatggtaggaaaattactctgaaaagagaacaagagagtgagaaaccaagccaagaactcttggaatataatatacagcagaagcagtctcaaatgctggagatgcaagtggagctcagcagtatgaaagacagagcaacggaactgcaggagcagctgagttctgagaaaatggtggttgctgaactgaagagtgagcttgcacaaactaaattggaactagaaacaacactcaaggcacagcataaacacctaaaagaattggaggctttcaggttggaagttaaagataagacagatgaagtacatttgcttaatgacacattagcaagtgaacagaaaaaatcaagagagctccagtgggctttggagaaagagaaagccaagttgggacgcagtgaagaacgggataaagaagaacttgaggatctgaagttttcacttgagagtcagaaacaaaggaatcttcagctaaatctacttttggaacaacagaaacaactactgaacgaatcccagcaaaaaatagaatcacagagaatgctatatgatgcccagttgtcagaagaacaaggtcgaaacttagagcttcaggtacttcttgaatctgagaaagttcgaattcgggaaatgagtagtaccctagatagggagcgggaattgcacgcacagctgcagagcagtgatggtactggacagtctcggccacccttgccctcagaggacctactgaaagagctgcagaaacagctagaggaaaaacacagtcgcatagtagaattgttaaatgagactgaaaaatataaactggattctttgcaaacacgacagcaaatggaaaaagataggcaggttcacaggaaaacactgcagacagaacaggaggccaacactgagggacagaaaaaaatgcatgagctccagtccaaagtggaagatcttcagcgccagctggaagagaaaagacaacaagtttataagttagaccttgaaggacagcgactacaaggaatcatgcaggaattccagaagcaagaactagaacgagaagaaaaacgagaaagtagaagaattctgtatcagaaccttaatgagccaaccacgtggagcttaaccagtgatagaactagaaattgggttcttcaacagaaaatagaaggagaaacaaaagaatcaaactacgctaaattgattgaaatgaatggaggaggaaccggctgtaatcatgaattagaaatgatcagacaaaagcttcaatgtgtagcttcaaaactacaggttctaccccagaaagcctctgagagactacagtttgaaacagcagatgatgaagatttcatttgggttcaggaaaatattgatgaaattattttacaactacagaaattaactggccagcaaggtgaagagcccagcttggtgtccccaagtacttcttgtggctcattgactgaaagactactgagacaaaatgctgagctgacagggcatatcagtcaactgactgaagagaagaatgacttaaggaacatggttatgaagctggaagagcagatcaggtggtatcgacagacaggagctggtagagataattcttccaggttttcattgaatggtggtgccaacattgaagccatcattgcctctgaaaaagaagtatggaacagagaaaaattgactctccagaaatctttgaaaagggcagaggctgaagtatacaaactgaaagctgaactaagaaatgactctttacttcaaactctgagccctgattctgaacatgtcactttaaagagaatttatggtaaatacttgagggcagaaagttttcgaaaggctctcatttaccagaagaaatacctgctgctgttactgggtgggttccaggaatgtgaagatgccaccttggccctgcttgcccggatgggggggcagccagctttcacggatctagaggtgatcaccaatcgcccaaagggcttcaccaggtttcggtcggccgtcagagtatccattgcaatttccagaatgaaatttttggttcgacggtggcatcgagtcacaggttctgtttccatcaatattaacagagatggctttggactgaatcaaggtgcagaaaagactgactcattttatcattcttctggtgggctggagttatatggagaaccaagacatactacgtatcgctcaagatcagatctggactatattaggtcccctttaccatttcagaataggtacccaggcactccagctgatttcaatcctggttctttagcatgttctcagcttcagaattacgatcctgacagagccctaacagattatatcactcggctagaggcactgcaaagacgacttggaactatacagtcaggttcaactactcaatttcatgctggcatgagaagataatcctttgaaacatcattaattgaagtgattttaaatagatttccttttgtaaatcaatggttcttttgtgcttttgtattgtgaatattcaatgggaccaatatgaacacagcttatgattgtatacaaatcccttgccagcacatgaaaacaaactggaatttgtatatataagcattgtgtatgtattcatgcacaataattattgaattacctgtatatttgtggaatgctaatttaaaacattaaattataaaccttgtgtatttatcaaatgggtgaaaagattaaacttttacgcattacaatactgctgaatgtgtagctcgaggtgtcctgcacttttcttataaggctactgaagttacatgttttgcctaatatattctactggtgatgaagacagataatatcacttgtagagacctatttttgtataatggtagaagttttgaattttatggggtattttgtcaagtactgaaataaaaactgaaataaaaatgacttcaccattttcaccacact

SEQ ID NO: 94 - DNA, 6058 bp, Homo sapiens
gaagatggcggcggcggcggcggtgacggcgcttcccgtgcggctgaggacgatccgccagtgagcgcggagactgcttccacttcgggcgggggagcgccggaccgaatcggctctctaggccgtggagcttgccgtcccacctccgtccaaatcgacctttcctttctatccccaaccacccctcaacccctgttttcccctgccttccttgcagaggccatggaggacgaggagagacagaagaagctggaggccggcaaagccaagattgaagaactctctttagcttttcttgtcagacagcttgcccagtttcgacaaagaaaagctcagtcggatgggcagagtccttccaagaagcagaaaaaaaagagaaaaacgtcaagcagtaaacatgatgtgtcagcacaccatgatttgaatattgatcaatcacagtgtaatgaaatgtacataaatagttctcagagagtagaatcaactgtgattcctgaatctacaataatgagaactctacatagtggagaaataaccagtcatgagcagggcttctctgtggaactggaaagtgaaatttcaaccacagcagatgactgcagttcagaggtaaatggttgcagttttgtgatgagaacaggaaagcctacaaatttattaagggaagaagaatttggtgttgatgattcttattctgaacaaggagcacaagacagtccgactcatctagagatgatggaaagtgagttggctgggaagcagcatgagattgaagagctaaacagagagctggaagaaatgagggttacctatgggactgaaggactgcagcagttacaagaatttgaagctgccattaaacaaagagatggcattataacccagctcactgctaatttacaacaagcaagaagagaaaaggatgagacaatgagagaatttttagagttgacagaacagagtcaaaaattacagattcaatttcagcaattacaggctagtgaaactctgagaaacagcactcatagtagcacagctgcagacttactacaagccaaacaacagatcctcactcatcaacagcagcttgaagaacaagaccacttattagaagattatcagaaaaagaaagaagacttcacaatgcaaattagtttcttgcaagagaaaattaaagtatatgaaatggaacaagataaaaaagtagaaaactcaaataaagaagaaatacaggaaaaggagacaatcattgaagaattaaacacaaaaataatagaagaagaaaagaaaactcttgagctaaaggataaattaacaactgctgataaattactaggagaattacaagaacagattgtgcaaaagaaccaagaaataaaaaacatgaaattagagctgactaattctaagcaaaaagaaagacagtcttctgaagaaataaaacagttaatggggacagtcgaagaacttcagaagagaaatcataaagacagccagttcgaaactgatatagtacaacgaatggaacaagaaacacaaagaaagttagaacaactccgggcagagctggatgagatgtatgggcagcagatagtgcaaatgaaacaagaattaataagacaacacatggcacagatggaggaaatgaaaacacggcataagggagaaatggagaatgctttaaggtcatattcaaatattacagttaatgaagatcagataaagttaatgaatgtggcaataaatgaactgaatataaaattgcaagatactaactctcaaaaggaaaaactcaaggaagaactaggactaattttagaagaaaagtgtgctctacagagacagcttgaagaccttgttgaagaattgagcttttcaagggaacagattcagagagctagacagacaatagctgaacaagaaagtaaacttaatgaagcacataagtcccttagtacagtggaagatttgaaagctgagattgtttctgcatctgaatccagaaaggaactagaattaaaacatgaagcagaagttacaaattacaagataaaacttgaaatgttagaaaaagaaaagaatgctgtgttagacagaatggctgaatcacaagaagctgaattagagaggctgagaacacagcttctatttagtcacgaagaagagctttccaaactgaaggaagatttagaaattgaacatcgaataaatattgaaaaacttaaagataatttaggcattcactataaacagcagatagatggtttacagaatgaaatgagtcaaaagatagaaaccatgcagtttgaaaaggacaatttgataactaagcagaatcaattaattttggaaatttcaaagctaaaagatttacagcagtctcttgtaaattcaaagtcagaagaaatgactcttcaaatcaatgaacttcaaaaagaaattgaaatactcagacaagaagaaaaagaaaagggtacacttgaacaagaagttcaagaattacaacttaaaacagaattgttagaaaaacagatgaaggaaaaagagaatgatcttcaagaaaaatttgcacaacttgaagcagagaatagcattcttaaagatgaaaagaaaacccttgaagacatgttgaaaatacatactcctgttagccaagaagaaagattgattttcttagactccattaagtccaaatccaaagactctgtgtgggaaaaagaaatagaaatacttatagaggaaaatgaggacctcaaacaacaatgtattcagctaaatgaagagattgaaaagcaaaggaacactttttcatttgctgaaaaaaactttgaagttaactatcaagagttacaagaggagtatgcttgccttctcaaagtaaaagatgatttagaagacagtaaaaataaacaggaattagagtataaaagtaaacttaaagcacttaatgaagagcttcatttgcaaagaataaatccaactacagtgaaaatgaaaagttctgtctttgatgaagacaaaacttttgtagcagaaacattggaaatgggtgaggttgttgaaaaggatacaacagaactcatggaaaaacttgaggtaaccaagcgagagaaattagagctgtcacagagactgtctgatctttctgaacaattgaaacagaaacatggtgagattagttttctaaatgaagaagttaaatctttaaagcaagagaaagaacaagtttcattgagatgtagagagctagaaatcattattaaccacaacagggcagaaaatgtacagtcatgtgatactcaagtaagctctttattagatggagttgtgaccatgacaagcaggggtgctgaaggatcagtttctaaagtaaataaaagttttggtgaagaatcaaaaataatggtggaagataaagtttcttttgaaaatatgactgttggagaagaaagtaagcaagaacagttgattttggatcacttaccatctgtaacaaaggaatcatcacttagagcaactcaaccaagtgaaaatgataaacttcagaaagaactcaatgtacttaaatcagaacagaatgatttaaggctacagatggaagcccaacgcatttgcctctctctggtttattcaactcatgtggatcaggttcgtgaatatatggaaaatgaaaaagataaagctctttgcagtcttaaagaagagcttatttttgctcaagaggaaaagatcaaggaacttcagaaaatacaccagttagaactacagactatgaaaacacaagaaacaggtgatgaaggaaagcctttacatctgctcattggaaaacttcaaaaggcagtgtctgaagaatgttcttattttttacagactttatgcagtgtccttggtgaatattatactcctgctttaaaatgtgaagtaaatgcagaagacaaagagaattctggtgattacatttctgaaaatgaagatccagaattacaagattatagatatgaagttcaagactttcaagaaaatatgcacactcttctcaacaaagtaacagaagaatacaacaaactcttggtacttcaaacacgactaagcaagatctggggacagcagacagatggtatgaaacttgaatttggagaagaaaaccttccaaaagaggaaacagagtttttatcaatccattctcagatgaccaatttggaagacattgatgtcaatcataaaagcaagttatcttctctgcaagatcttgaaaaaactaaacttgaagaacaagttcaagaattagaaagcctcatatcctctttgcagcaacagttgaaagaaactgaacaaaactatgaggcagagatccactgtttacagaagaggcttcaagctgttagtgagtccacggttccgccaagcttacctgttgattcggtggtaattacagaatctgatgcacagagaacaatgtaccctggaagttgtgtgaaaaagaatattgatggtacaatagagttttctggtgaatttggagtgaaagaggaaacaaatatcgttaagttgcttgaaaaacaataccaagaacaattagaagaagaagtagctaaggttattgtgtcaatgagtatagcatttgctcaacaaactgaactgtctagaatatctgggggaaaagaaaatactgcatcatcaaagcaagcacatgctgtgtgtcagcaagaacaacattattttaatgaaatgaaattatcacaggatcaaattggttttcagacttttgagacagtggatgtgaaatttaaagaagaatttaaaccacttagtaaagagttaggagaacatggaaaggaaattttattatcaaatagtgatccccatgatataccagaatcaaaggactgtgtgctgactatttcagaagaaatgttctccaaagataaaacatttatagttagacagtctattcatgatgagatttcagtgtcaagcatggatgcttctagacaactaatgttgaatgaagaacagttggaagatatgagacaggaacttgtacgacaataccaagaacatcaacaggcaacggaattgttaaggcaagcacatatgcggcaaatggagagacagcgagaagaccaggaacagctacaagaagagattaagagacttaatagacaattagcccaggtaagggtcttgtagtcccctttctctccccagttatttttttttccaaacaccaacttgaaccagatccccaattaaaacaacagtattttttatgtagccataatttttttttttttttgccgaaatctgaataaactacatatatttagcatcaggaacacactctatactaagacagcagctttagatcttgttagggacacctatctcaaccttggagtgggcattgtctttctgtcattttatttaactcctttttcaagcactggaaaagtggctacacggttttgtttttttcttttaaatcattccattagccatatatagcaaactcactttgacattttggaaataacattgtgctgaggtgctccattatgcagttactatcattcagttttactatcttcatttatagttttgtgagtccaccaattagcatctcgaaggtttacctttatctgtctttaatccatctttttaatcatgaatggaaatcggaagtagtatgcttctgaaactctttccagggaaacatctcttcttgatttgagaaatgcaaatttatttaacattcttatccctttcttgactaaatttaaatacttcttggtatttgggagctggattcttgtcaactgctgtataaaatatactcacaaaaccattgcagaaaagcaagaaatatttatgtagaagttcttatgaaaacttattgaatttaattttgaaaactgaagctaagagagataataaatatctagagataactattaacagtattctttcaaacataaaataataagataattgggagctgagcataaaacattatttggaaaaattaactttgcttttcttcattgcattttgtgaattc

SEQ ID NO: 95 - DNA, 1904 bp, Homo sapiens
aacactatgttgccgttcagttactgaaagaggaatgtggtaccttgaaggcagtgatacagtgtctgagaagtaaagagggatcctcaattcctgagctagcacattctgatgcttaccagactagagaaatatgctccagtgattctggatcagactggggtcagggaatttatcttacacacagtcagggatttgacatagcatcagaaggccgaggagaagaaagtgaaagtgcaacagattcctttccaaagaaaataaagggattactgagagctgtccataatgaaggcatgcaggtgctttctctcactgagtctccctatagtgatggagaggaccattctattcagcaggtttcagaatcttggctagaagagagaaaagcttacatcaatacaatctcatctctaaaggatttaattacaaagatgcaactgcaaagagaagccgaggtttatgatagttctcaatctcatgagagcttctcagactggcgaggtgaactactgcttgcccttcaacaagttttcttagaagagcgtagtgttttactagcagcatttcggacggagctgacagctctaggtactacagatgcagttggtttactaaactgtttggaacagagaatacaagaacagggtgttgaatatcaagcagctatggaatgcctccagaaagcagatagaaggagtttgttatctgaaattcaggcactgcatgcacaaatgaatggtaggaaaattactctgaaaagagaacaagagagtgagaaaccaagccaaggtatgttgtatgacaagctcatatggttacacaaacaggtgaaaagatttcactttgttttctttcttattattattaagttaaaacatattttcttggtcacattttcttctcattctcataatgttaaggatacaatctatattaattactctaggggttagaggattgtctaattggtttaaacagctacgttgactttaaaataaactgccattcccctgataaggttaagcccattggattcattctttttctttattttagagctgtatgttaagaaaacagtctttccaatcataaaacagaaaatactctttagaggaaaatccacaatgcatgtaactaattattttttaatccttttttaaaaaaattgtgagccataacatacagaaaattacaaattgcaaatatgcagtatgacgcatttttaaatgagtatctatggaaacatcacccatgtgaatatagccagtatcccaacagccccttctcccaagcacatgctcctctgagtaacttagaggtaatcattgttctgatttttctttagttttactatctatttatatattcctaaaacatttaagtttcaagtttttttctgtttttgaactttatcaatctgtatgtattttttatcttgtttctttcacctctctgtaacattcttccaacattcttccaagttactgcatttttcaagttactgcattcttccaaattagtagtagaacattcttccaagttactgcatttatctctagttcattcattcttgttactctataactctatgaccctgtgtagggccaggcacggtggcttacacctgtaatcccagcactttgggaggctgacgtgggtggatcacgaggtcagaagttcaagatgagcctagccaaaatggtgaaacccagtctctactaaaaatacaaaaattagccaggcgtggtggcgggtgcctgtaaggccagccactcaggagactgaagcagagaattacttgaacccagaaggtggaggttgcagtgagctgaaatcacaccactgcactctagcctgagcgacagagcaagactccatctcaaaaaaaaaaaaaaaaaaaa

SEQ ID NO: 96 - DNA, 101 bp, Homo sapiens
gttgaccccggagggctgggccggggcggcaccccaggagcacctgcccatgaggcggctgcgcggacagacgttccagcccctcccgcctcgccgtgtgt

SEQ ID NO: 97 - DNA, 101 bp, Homo sapiens
gacgatccgccagtgagcgcggagactgcttccacttcgggcgggggagccccggaccgaatcggctctctaggccgtggagcttgccgtcccacctccgt

SEQ ID NO: 98 - DNA, 101 bp, Homo sapiens
tttttctttcagattgaagaactctctttagcttttcttgtcagacaggtstgtgttagtgaattctctcagcttttgtttgtctgtgaaagactttgttc

SEQ ID NO: 99 - DNA, 101 bp, Homo sapiens
caaatgaaacaagaattaataagacaacacatggcacagatggaggaaattaaaacacggcataagggagaaatggagaatgctttaaggtcatattcaaa

SEQ ID NO: 100 - DNA, 101 bp, Homo sapiens
tttgctcaagaggaaaagatcaaggaacttcagaaaatacaccagttagagctacagactatgaaaacacaagaaacaggtaaaatggtttctgacttata

SEQ ID NO: 101 - DNA, 103 bp, Homo sapiens
tcaatcataaaagcaagttatcttctctgcaagatcttgaaaaaactaaacaacttgaagaacaagttcaagaattagaaagcctcatatcctctttgcagca

SEQ ID NO: 102 - DNA, 101 bp, Homo sapiens
tttttgtctcccatgccccagtacacattttatgtgtggtgtagattttggatgaacactaaagcacatatacaactctaattctttaaccttttttattt

SEQ ID NO: 103 - DNA, 101 bp, Homo sapiens
tgtttatacaattttgagtactaatttactttttaaattcctgctgatatgtctaaatctaatcctttattgtttgcttttatttctttaggttattgtgt

SEQ ID NO: 104 - DNA, 101 bp, Homo sapiens
agtggacataagcaaagtgtttgcttcaaaaatattaaacattttaatcaatgcttctttatctatacaggtatgcactccagaaagctaataatagactt

SEQ ID NO: 105 - DNA, 101 bp, Homo sapiens
aataatagttctattttctgttaattttgtattataggcgtcattgatggttatgcagatgaaaaaactctttttgaaaggcaaattcaggaaaaaactga

SEQ ID NO: 106 - DNA, 101 bp, Homo sapiens
tacgaaactccagcagcaacttaaaattacaacagataacaaggtatacttatttaaaattgattatgaaattaatatgaaccagagttttaaagggcaaa

SEQ ID NO: 107 - DNA, 101 bp, Homo sapiens
attccttggatggttttattagaatgtataagagccttgaatttagctatgttttttttaaattatgtgtttcttgtgtttccgctgtcattcagacaact

SEQ ID NO: 108 - DNA, 101 bp, Homo sapiens
taagagcattgcatcccagacagatgggactctgaagatcagtagcagcagtcagactccacaaattcttgttaaaaatgcaggaatacaaattaatttac

SEQ ID NO: 109 - DNA, 101 bp, Homo sapiens
gaggtatttggtttttataatatgtgtttttcaacattgtgtggtttttttaaaaaaaaaaatcagtttaattcattttgtagatgacaaaccaaaatgca

SEQ ID NO: 110 - DNA, 101 bp, Homo sapiens
aagttttcttagaagagcgtagtgttttactagcagcatttcggacggagttgacagctctaggtactacagatgcagttggtttactaaactgtttggaa

SEQ ID NO: 111 - DNA, 101 bp, Homo sapiens
tgttaagaaaacagtctttccaatcataaaacagaaaatactctttagagaaaaatccacaatgcatgtaactaattattttttaatccttttttaaaaaa

SEQ ID NO: 112 - DNA, 101 bp, Homo sapiens
gcattcttccaaattagtagtagaacattcttccaagttactgcatttatttctagttcattcattcttgttactctataactctatgaccctgtgtaggg

SEQ ID NO: 113 - DNA, 101 bp, Homo sapiens
ctgacgtgggtggatcacgaggtcagaagttcaagatgagcctagccaaagtggtgaaacccagtctctactaaaaatacaaaaattagccaggcgtggtg

SEQ ID NO: 114 - DNA, 101 bp, Homo sapiens
cttattctgtccaaaattgccagccaaccacgtggagcttaaccagtgatcgaactagaaattgggttcttcaacagaaaatagaaggagaaacaaaagaa

SEQ ID NO: 115 - DNA, 101 bp, Homo sapiens
gtagaacgtcgcctgctctgtaatgtttgtggtagtaaacacccccaattaagaaggtatgttttgactttttgtctttttcttgaagactacagtttgaa

SEQ ID NO: 116 - DNA, 101 bp, Homo sapiens
tatgagaaaacctgcctggaattgttaaatgtattaatatttaacagagaaaaatggacatttttagggctttgacttctttgcattgagatagacatctt

SEQ ID NO: 117 - DNA, 101 bp, Homo sapiens
aactgaagctaagagagataataaatatctagagataactattaacagtactctttcaaacataaaataataagataattgggagctgagcataaaacatt

SEQ ID NO: 118 - DNA, 101 bp, Homo sapiens
taagagagataataaatatctagagataactattaacagtattctttcaagcataaaataataagataattgggagctgagcataaaacattatttggaaa

SEQ ID NO: 119 - DNA, 101 bp, Homo sapiens
aaatatctagagataactattaacagtattctttcaaacataaaataataggataattgggagctgagcataaaacattatttggaaaaattaactttgct

SEQ ID NO: 120 - DNA, 101 bp, Homo sapiens
aaatatatgtactttttgttttctctaattagggatcctcaattcctgagttagcacattctgatgcttaccagactagagaaatatgctccagtggtaag

SEQ ID NO: 121 - DNA, 51 bp, Homo sapiens
ccacctattcaggaggcagaaaaatgatcagtggaccaaatttataacccg

SEQ ID NO: 122 - DNA, 51 bp, Homo sapiens
tgaatgaacataactaaagaagaaatgtcaaggctgagaaaaagaaaagcc

SEQ ID NO: 123 - DNA, 51 bp, Homo sapiens
tttagctcttaagtcttagaaaaaattaagatcatcgttcttcctcgctca

SEQ ID NO: 124 - DNA, 51 bp, Homo sapiens
caaacaataaaggattagatttagacatatcagcaggaatttaaaaagtaa

SEQ ID NO: 125 - DNA, 51 bp, Homo sapiens
tttctaataaacagtatttcaagcagtcttcctttaattagtgatgctttc

SEQ ID NO: 126 - DNA, 51 bp, Homo sapiens
tgatatttgaaatatcctattaaaagaagaataattgcatactggatattt

SEQ ID NO: 127 - DNA, 51 bp, Homo sapiens
tattcattatgacactttatttaaatgttgaggcatgaaatgtatctgcca

SEQ ID NO: 128 - DNA, 51 bp, Homo sapiens
agcagaagagtcactctggttcttctatggaatctggttctacttttcact

SEQ ID NO: 129 - DNA, 51 bp, Homo sapiens
ttcctttctcttccagcatcagacttctatacctgcataatctacttctaa

SEQ ID NO: 130 - DNA, 51 bp, Homo sapiens
cactcggggatacagtcaggatgaataaattattttacatttttagcaata

SEQ ID NO: 131 - DNA, 51 bp, Homo sapiens
ctgttaacaaggagtgtctcctcatgaaggtggcagccaccagaacgaggt

SEQ ID NO: 132 - DNA, 3271 bp, Homo sapiens
  exon (1501)..(2770)
tcccttgtttattccactctagccaccctcacctcctactcttccttgagaaggtccatcatggtctcgcttgagggcctttctttggatttgctgtaccctcaactatctccgtggctctctacccccacccaccacctgcttgttttttgggacagtgtcacctgttgtctaggtccttactctagagtgcagtggcacaatctgggctcactgctttggcctcccggcctcaagtgatcctcccgcctcaggctctggagtagctaggactacaggctcccgccaccacacccagtattttatttttatttatttatttatttattttgtagagacagggtttcgtcatgttgcccaggctggtttcgaactcctgagcttaagcgatccaccccgctcagcctcccaaagtgctgggattacaggcgtgcaccaccccgcccagcctcctcatctctttcaagtctttgctgaaatatcttctgaaagaatcacctgagtaagtgaatgacatgacatgaattaatgattggtatgacaagttatgacagaataggtgccataaggaagagtcagaacactagtgcccaatgcttgctcttctaatagaagttaacacaaatctaactttcaacattgattgagcacccattatgtaaactagacatgtatatgattggctgctatcagtgaaggaaacattgaaataatcttgttgctttggaaggtattcttgaacattctcagcacctacaaacagctgacttatttagtcaccgagaaagcagtatcctttaacaaacaggaatagctttggataccctggggcttccccctcctaggcaatcagcatctacactcataatccctcaatccaggcagtatttaaatcactgcactattagaacacttagttctagtccttactcttaatttgatgggtgactaagtaaatcacttattgcctcaattctttcatccctatgataaaatgtctaattttacctggttcctaattcaggttgagataacaggacaatatgcacttggctgttagaagttggcagaatgtatgcattacggagcttaagaaaaaaatcttttttaaagctaagatttctaaatgagggctatttaaaactcatcttcagtttgtggtagacttaaggtctttattatctccttttttgttttttaacctcaatttttcacttaacaccacttctacgcttgaactcattttagcctattttttgttcacaactgctagtttttcagtccaacctagctcaaagcaacggagaaacatgataaatctgagtaatcaaccagagacattaaaatgtgtagttcactccaggaatggatgtgagcattggagggcagggagacgaacacaaaggactgagggagcacatgtcggggaaacaaggaaagatagtaatgttaaatttataaacactgctcaattcaatccaaaaagcgtttattgagtgcagagctctgtgctggtcattttagtaaagccaagatgagcaagacttatgatgagtctctgtcatcaaggagctgggagtatgagctgaactaagacgcacacaaattattaaaatatggtgcagggtacttaaaggaagtccaaggagaaataaagctgacattattcaggacgttttaatatgtcagggcagtcacatatattaacaacccttccaaaaattccaggtaggctcagggaggataggtaacttgtcattaacgctagaaagttagtgtagtctggcattgtccctaaccgaggttctaaagctcaggctcctttcagaacactactgttaaagggaagccccaaagagtcgggggaggggactaagttttgactggatgtgtctcggttgccgtggagggaacaagaggtcagaaaagccatttggaggcagcgtgtgcgatgggactataaggatgaaccggagattgagtgggaaccagtggagggaagagggagggacttttcaggctaaggaagtaataagagcaattagctgctctcataattcttgagtcaagcagttaatgtaggtagaaaacctggcgtccgcccccccaccaccccccaccggaacttttccgttggagcttgtaggtgttcgccaatttcaccattaggtgtgttagttttgtaacctgaaggaaaaaaaaaactcatgttttaatagcagtggattcctcggacggagggtgggggtcaggccaggagcctctggcacactccgtctctcctacccctcagctcggccgccacctgtgagccgttgatgtgcgggaagggcgctctctacggcgggatcctcgctggtaggaggcaggtcccaggcctggcaagggttgaccccggagggctgggccggggcggcaccccaggagcacctgcccaygaggcggctgcgcggacagacgttccagcccctcccgcctcgccgtgtgtttacgtggagacgaagatggcggcggcggcggcggtgacggcgcttcccgtgcggctgaggacgatccgccagtgagcgcggagactgcttccacttcgggcgggggagcsccggaccgaatcggctctctaggccgtggagcttgccgtcccacctccgtccaaatcgacctttcctttctatccccaaccacccctcaacccctgttttcccctgccttccttgcagaggccatggaggacgaggagagacagaagaagctggaggccggcaaagccaaggtaggagagcccgaggcaaccgggcctgcggtgggaggcggtggctagcacggggtgggagggggcctgggaagcggagttcgccgcagccccagtgcactgcccgagagggaggtgctgcagggtcttagggtctgcatctctcctcgccctcctcctttcccctttttccagttgggggacaaagccttgtgctagctgataatacttccgcgaggattgaatattgtggctcctttctcgtgaatgtccaaataaaactccccttttactgtattgctgtaaactagtgtttagttgcttctaaacctccgatctttcatttttttaaggagttttctgggtggtgcaggcattgtgctttccagggtggggatttagggcttttctttattgggttggggatttgtgcgctgatcatcagcttgtcttccttaggtagcacgctggcactcttgggtgtgtgtgattggcctgtgacagctgtctcagcagtggctt

SEQ ID NO: 133 - DNA, 1037 bp, Homo sapiens
  exon (501)..(536)
aattcctctcttcttcctttcttactgtctttctttgaagttaagtgatttttttttctggtagtatgtttgaatttgttgattttttatttgtagtgaatttattatagtttttggcattgtggtcaccatgagacttaaaaagacataggttcaagcagttattttaatgatatgacaacttactttagatcacaaagaaaataatggaaacaaaagaaaaaaaaaccctctatactctaactccattccctccacattttgactttactttgtctcaatttacatgtttttatattgcctatttcttgataggatgctgtagctattaatgtttttggtaggtttgtcttttggacttcatcctagagttatgagtgggcgctacaccacaattacagtattagagtattgtgggtttgtccacgtacttaattttactagtgggttgtatacctttacatgttttgttttttcacattagtgtttttttctttcagattgaagaactctctttagcttttcttgtcagacaggtvtgtgttagtgaattctctcagcttttgtttgtctgtgaaagactttgttcctcttctttgtatttgaaggatagctttgctggatacagtatccttgggtggctgtttttttccttcagcactttgaacatgttgtcccacatcctcctatatggtttcttcctcctgtatgacctgtatggtatctgttgagaagtctgttgccagacgaattgtagctcttttatacattgtttgcttcttttcttttgccacttttaggatcctctctttgtccttgaccattgagagtttgattattacatgctttggagtaatcttttttgggtcaaatctgctttgttctctaacgttcctatacctggatattttatctctttctcaagttttaaaaagtttttattatttcttgaataagatttctacccccttgcattaaagttaggcattatattatgtagtgctgaaaaacaggcggtgacatggtaccaaaaaaaa

SEQ ID NO: 134 - DNA, 3389 bp, Homo sapiens
  exon (501)..(2888)
taggagtctgtttttgttgtttttctttttccatagcccttgcccatgacacacattgaagtcaccagaatacatgtgaggaacttttatttatttttatctttctgaatgtgtctagagtatatgcagtactttagctatagagaatactaaatatttagaatgttgatcagttaataagaaaaatgaaaatgtaacagtttggagacatctaaaatcagactgggtttttaaactaaaaattttaatcacagaaatgttaagagaaatttcttctaagaaggccaaaactactgtagtgtttgctcacaagtagtgttggttacacgagttctaagtgtcattattgtggaaaaaattgaggggcaggaccaacatttactttttgtagaattttttaaaagagaaacttctgtcagtcttttggtaatgagatgaagcagtataatttgccagaagctaaaaatgccattcttacattttcattttttttcctaaaggaacaagataaaaaagtagaaaactcaaataaagaagaaatacaggaaaaggagacaatcattgaagaattaaacacaaaaataatagaagaagaaaagaaaactcttgagctaaaggataaattaacaactgctgataaattactaggagaattacaagaacagattgtgcaaaagaaccaagaaataaaaaacatgaaattagagctgactaattctaagcaaaaagaaagacagtcttctgaagaaataaaacagttaatggggacagtcgaagaacttcagaagagaaatcataaagacagccagttcgaaactgatatagtacaacgaatggaacaagaaacacaaagaaagttagaacaactccgggcagagctggatgagatgtatgggcagcagatagtgcaaatgaaacaagaattaataagacaacacatggcacagatggaggaaatkaaaacacggcataagggagaaatggagaatgctttaaggtcatattcaaatattacagttaatgaagatcagataaagttaatgaatgtggcaataaatgaactgaatataaaattgcaagatactaactctcaaaaggaaaaactcaaggaagaactaggactaattttagaagaaaagtgtgctctacagagacagcttgaagaccttgttgaagaattgagcttttcaagggaacagattcagagagctagacagacaatagctgaacaagaaagtaaacttaatgaagcacataagtcccttagtacagtggaagatttgaaagctgagattgtttctgcatctgaatccagaaaggaactagaattaaaacatgaagcagaagttacaaattacaagataaaacttgaaatgttagaaaaagaaaagaatgctgtgttagacagaatggctgaatcacaagaagctgaattagagaggctgagaacacagcttctatttagtcacgaagaagagctttccaaactgaaggaagatttagaaattgaacatcgaataaatattgaaaaacttaaagataatttaggcattcactataaacagcagatagatggtttacagaatgaaatgagtcaaaagatagaaaccatgcagtttgaaaaggacaatttgataactaagcagaatcaattaattttggaaatttcaaagctaaaagatttacagcagtctcttgtaaattcaaagtcagaagaaatgactcttcaaatcaatgaacttcaaaaagaaattgaaatactcagacaagaagaaaaagaaaagggtacacttgaacaagaagttcaagaattacaacttaaaacagaattgttagaaaaacagatgaaggaaaaagagaatgatcttcaagaaaaatttgcacaacttgaagcagagaatagcattcttaaagatgaaaagaaaacccttgaagacatgttgaaaatacatactcctgttagccaagaagaaagattgattttcttagactccattaagtccaaatccaaagactctgtgtgggaaaaagaaatagaaatacttatagaggaaaatgaggacctcaaacaacaatgtattcagctaaatgaagagattgaaaagcaaaggaacactttttcatttgctgaaaaaaactttgaagttaactatcaagagttacaagaggagtatgcttgccttctcaaagtaaaagatgatttagaagacagtaaaaataaacaggaattagagtataaaagtaaacttaaagcacttaatgaagagcttcatttgcaaagaataaatccaactacagtgaaaatgaaaagttctgtctttgatgaagacaaaacttttgtagcagaaacattggaaatgggtgaggttgttgaaaaggatacaacagaactcatggaaaaacttgaggtaaccaagcgagagaaattagagctgtcacagagactgtctgatctttctgaacaattgaaacagaaacatggtgagattagttttctaaatgaagaagttaaatctttaaagcaagagaaagaacaagtttcattgagatgtagagagctagaaatcattattaaccacaacagggcagaaaatgtacagtcatgtgatactcaagtaagctctttattagatggagttgtgaccatgacaagcaggggtgctgaaggatcagtttctaaagtaaataaaagttttggtgaagaatcaaaaataatggtggaagataaagtttcttttgaaaatatgactgttggagaagaaagtaagcaagaacagttgattttggatcacttaccatctgtaacaaaggaatcatcacttagagcaactcaaccaagtgaaaatgataaacttcagaaagaactcaatgtacttaaatcagaacaggtatgtttacttcttcatatatggtaaagcacaatgaaaaaaatgtacatttcacactaaggtttcaccttcatagaacataagttcatatccttacaagagaatgaaaatgaaccctctgatgtaattttaacttgagcctatcatttatttatcatttaagtacttttttttttaaaccattgttgcctttctttcagttaatctatcttgtatattctgctcaggaaataaaacactaatggattcagattttctttggaaagacaagagtttgtataactttatggagaatctcagcattagaaaagttattaatttcattttgtaatttttgttataatctcaaagattggtttcagcgtttttatttcatagtgatgttttcaagtctctacaactgaaaatgaactcctaagctttttaatagtctctatagttgttaggtggttatgaaattatattttcctgggagaaaaaaaaacctttgatttaagtcct

SEQ ID NO: 135 - DNA, 1215 bp, Homo sapiens
catctttacctaaaaataaaaagttagctgggcatggtggcatgcaccagtagtcctaactacttgggaagctgaggtgggaggatcgcttgaacccaggaggtcaaggctgcagcgagccatgattgcaccactgtactccagcctgggtgacagagtgagtatttgttaatttgggttgtgagtacataaatgtttattacttcattatttccatgtctgtacgtttaaaatcttttagaacaaaaaatcaaagatgagtcatgctagctataccaaatatcacaatttagtataaaactgaggtaatgaaaacattgtgctactttccttgaaaaagaaaggtagatcaatgcaacagcacgaagatagaaaaaaaattagacttcagttctcatgaatttttaaactcttgtagtcagtatatgcaaaaaaaagaagttaaattatttgatttgtcatttaagaatattataatgtttacatatgtttactttaagaatgatttaaggctacagatggaagcccaacgcatttgcctctctctggtttattcaactcatgtggatcaggttcgtgaatatatggaaaatgaaaaagataaagctctttgcagtcttaaagaagagcttatttttgctcaagaggaaaagatcaaggaacttcagaaaatacaccagttagarctacagactatgaaaacacaagaaacaggtaaaatggtttctgacttataagtaccatgatccaaataagtattggatagagcccaccattctataattttttccttgtcatagaacccacagaggaaggtgatttgtttaccagttgttgatataatcactagacattcatttaagtgcttgagaaagctaaaatcattttcccataggaagtcacaatccattgcgaaagcatatataaaataaacaatttctccaacagaagaatgaatagaaagaatgggaggagaaaggagaaacatctagtacttcctggcaggatgagtagggtgaggtggtagacagtggtggggttggaattttttttttttttttttttttttttttttttttttgagacggagtctcgctctgtcgcccaggctggagtgcagtggcgggatctcggctcactgcaagctccacctcccgggttcacgccattctcctgcctcagcctcccaagtagctgggactacaggcgcccgcc

SEQ ID NO: 136 - DNA, 1771 bp, Homo sapiens
  exon (501)..(610)
  exon (1072)..(1270)
aataagctgagatttatctattttcattattttcttttctttttgtttactgtacagagcaccataccatttgtcagttacctggttgtacataggatatatctagagataaacaagctgtattaatcaagtattgctaatataaaatttattatgtatgaattgaaatttcaaagaccaaggtatactataaatattgttatcagctttctaccaaaattctcagaagcacttgtttttgtagtaaaatgaacttcctttcagatatcaaagaacattactaatataatttcagtgctatgaaaggtatggaatattaattactgttacagaagagaacagggaataacttagaagggaaaatgcttgtattagagtgccacaattttgggtggttttaaaaaagcatcttaaatgcagagttgctttaatacagctttctaattgctggattatgtatttatgttactgcttttattctgtggttttcaatagatctggggacagcagacagatggtatgaaacttgaatttggagaagaaaaccttccaaaagaggaaacagagtttttatcaatccattctcagatgaccaatttggaagacattggtaaattttgatcatataccacaatgtggtgtttttatagcaaatattgagtaatttgcttttttactttaaaatgtgagctaacgtagtgacctttggcatttcactgtagcctctctgatctcaattttttcatccttaaaatgaaagatttggactactttctatttggtcctttcccccttcttatgttctgtgattctgaattgttttaaattttaaagatataaaattttggatttaggagtactacagcatgaggatcaaaaagatgatcttgaattgtactatttatgttttcttgttttcatcagaatgagtttaaattgaaaccagagttattaccactaaaaacatactttttcaaaaaagaattaatattttctgtacacagtgattgtgctatttcactaagaaacttatattgaaatgtgcattttttgtctctttatataacatagatgtcaatcataaaagcaagttatcttctctgcaagatcttgaaaaaactaaacaacttgaagaacaagttcaagaattagaaagcctcatatcctctttgcagcaacagttgaaagaaactgaacaaaactatgaggcagagatccactgtttacagaagaggcttcaagctgttagtgagtccacggttccgccaaggtattcatctgcttatagcttcattcaacagtatttgtagctttgtaacaattatagtatcatccagaatggttatttaaaaaagtaacttaagcaaagttgctggaaagagataggatgtagcattttttagaaagaagagcaagagatcattctatatctttgaaatgcctgaaaaaaatgttgatgtaaaccaaagacattataggaattttacttaaatttttacattataaagatgttggttgttgttaatctgcttaattaaatcggcagtgtgcacatatttgcagtttattctgtacctagtctttgctactttgatatggtgaatacttaaggaatataaggtaggatcattccagtcatggcagggtttcctccactttgttgtctcatgttcaaattcaccacgtccaaagtagaactctggctcttctcaaaatttgctccttctgcagctatatccatctgtcgttactcctctttctcttatacctc

SEQ ID NO: 137 - DNA, 1098 bp, Homo sapiens
  exon (501)..(597)
tatacatatgtatgttaaaagaagtttctcataaaagtgagattttacaaacttttttaaagtcattaatatatcttagataactttaaaaaaaatgttagtactggccaagcacagtggctcatgcctgtaatcccagcacatttggaggctgaggcgggaggatcacttgaggccaggagtttgagatcaacctatgtaacgtagtgagaccccatctttccaaaaaaacagtcggtacttatggttccatatcatacatttgtagtgtaaaatgacataaaattcagttgatcacctggtaaaatactgttattcaattgtgttcttttaagtggaaatattagtcaaaaatatgatttaacttgcaatacctataaccctagactcatttttgtctcccatgccccagtacacattttatgtgtggtgtagattttgsatgaacactaaagcacatatacaactctaattctttaaccttttttatttatattcagcttacctgttgattcggtggtaattacagaatctgatgcacagagaacaatgtaccctggaagttgtgtgaaaaagaatattgatggtacaatagaggtattatatttttaatttttatcttttaactgttatatacactgatttttctatcatttttatgtctggtttactatctaataaatagttgctgagaagtaagcataataaatatgaggataatgccttatatagaaaactcagaatacacatgtaaagaaatttaatctatttttatagcataggtaacacacagaggaagttaagtttgggggttatatttcccttaaatatgttatagtttaagatttatcttgttttttgtaacatgtgggctatgtacaaattagtttcagtgccctggtcaacaaagctttgtcttcccagcatgggaagttggacaaggccatctctagaaaagtgtttaggggccaggtgtgatggctcatgcctgtaatcccagcacttcagaaggccgaggtgtgtggatcacgaggtcaggagatcaagaccagcctggctaacatggtgaaaccccatctctactaaaaatacaaaaaa

SEQ ID NO: 138 - DNA, 1355 bp, Homo sapiens
  exon (501)..(854)
attacatagaaatgtatttctatttcttaacttgaagaggtatttactatagttaagctacaaaaactggttacagtattagaatatgatcacgtttttataggaaaattatatctgtatctattcatatctatctctgcaaagaagaataagaagatttgggaaagtattcactaaaatgtttacattgatttttcttggaagagagaaatataagggcttttattttctaatttttactgaacatttatgtctgttataataagaaaacattttactttttatttaaagtggcaggcagtaaaataaatactttgacattagatttattgtaaaaagagaatccatctcggtattactttattataggatttctttttgtttagaaccgtgaggccatgcttttttctgtttatacaattttgagtactaatttactttttaaattcctgctgatatktctaaatctaatcctttattgtttgcttttatttctttaggttattgtgtcaatgagtatagcatttgctcaacaaactgaactgtctagaatatctgggggaaaagaaaatactgcatcatcaaagcaagcacatgctgtgtgtcagcaagaacaacattattttaatgaaatgaaattatcacaggatcaaattggttttcagacttttgagacagtggatgtgaaatttaaagaagaatttaaaccacttagtaaagagttaggagaacatggaaaggaaattttattatcaaatagtgatccccatgatataccagaatcaaaggactgtgtgctgactatttcagaagaaatgttctccaaagataaaacatttatagttagacagtctgtaagtatgcctccttgaatataaaaaacttatttaaaaattgtgaattctttcactttaaaaatattagcaatagtgctgcttaatgtttggaggaggaaaatatcaaattcagtcttatgactcacgttgttttgttttgttttgtttttgaggctgagtctcactctgtcgccagggtggagtgcagtggcatgatctcggctcactgcaacctccatctcccaggttcaggcgattctcctgcctcagcctcctgagtaactgggactccatgcgcgtgccaccacatccagctaatttttgtatttttagtagagacaggattttaccatgttggacaggatggtctcgatctcttgaccttgtgatctaccctcctcagcctcccaaagtgctgggattacaggcatgagccaccgtgcccagccagttcacactgttaatgtgttttattaattgtaagatatatggataagtgacttaatattagtatcaaat

SEQ ID NO: 139 - DNA, 1207 bp, Homo sapiens
  exon (501)..(706)
actaccacataattttttctggtgtgattttaaaattatgtttcaaaatatgtttttatgtttaacatatagaaagatttaaatgtgcaaaatacatatgtataaccatgggcagcaagctcaataacttgcatatgctttggcactaccatactttttaaaacttaaattttgtctcccaagattttctcttaacctagttactggcttaagactttagttatttttttcaagtcaattaaataccgtacattttaaaaaatggtatgattaagctaattggccaaaatttttcagacaaaaacaaatcattttataatatagttacaaataaaaaacaagaagcactttattgtagatgctattgggtattttaataaaaaggatcatctgttatttttcaaatcaaatattttgcagtgtactttttagtggacataagcaaagtgtttgcttcaaaaatattaaacattttaatcartgcttctttatctatacaggtatgcactccagaaagctaataatagacttttgaagatcctcttagaagttgtaaagacaacagcagctgttgaagaaacaattggtcgccatgtccttgggattctagatagatctagtaaaagccagtcatctgccagcctaatttggaggtcagaagcagaggcatctgtaaagtcatgtgtccatgaggaacatacaagaggtactagttttctgtgttgtggaaacaatcatttcaacaaatctgctgagttcaaggcattttgccatgtgttgaaaatatagaagagaaaataagtattttccagcaaatggaccttcaaacagaaatacattagagcaactcttttcaaacaccattattgtatagcatttgcaagtgggtatcatagagttgtcattatatttacccagggttgccacagtgcctacataaaccagaatgctgttacatttctccaccgataaaagaaaatttatatatcagcacttagtactcttaccagtatctgtgaggtatggatgacatcctgaaaccatcctatagattaaggaaagattagaaataaagactttttaggaacccagcaccagcttcatgtacctgttgaaatggttagaagaaagtcttgataagaaacccaagatttggtgttacctttggactgtcctttgctagattctttcttccttttgaaaaagt

SEQ ID NO: 140 - DNA, 2228 bp, Homo sapiens
  exon (501)..(663)
  exon (1515)..(1727)
ttgtgctactatcattttgttaattgatgccattgtattaatcatgtattattggtcccccacagtatacagcagatactgtaggagtcacaatccgtaaatactaaatgtagaagaaagtttatcatagactgtatagttacataaaattctttggcaaatacaataaacgcctgtgcttcattaactttatatcttcttttatatgataaagtacacagccattgatttaaagtggtttgtatccaaaagaagcatattcttttgttcagtaaagctagaatacatcactttacagaaagtcgtgcacagccaatatacatgtctcctctgatttctcctacctgctaatcttagcatacactggcaatatctaaatgactacaattcagtagtatatctttattttaaaatcctccttttttccagctttaatagggaatgaaactagtatttccacactttattttcttttatgtattgtttccctctttgtttagcttgaacatgcgaaagtgacacagacagagttgatgcgtgagtcatttagacagaaacaagaagcaacagagtcccttaagtgccaagaggaacttcgagagcgccttcatgaggagtccagggccagagaacagctagctgtggagctcagtaaggctgagggtgagcaatttgccattgacaactaagggtagagaaatttcagtcttaaaatagagatttttgatgcacagccaggtttggaagccgtcaatccaatttagaatgaccattaaaaagtacttgtggtttatcttcagagttcctccaagcaatttttaaaactatatatatatatatatatatatatatatatatataaaattataaaaagaatttatagagttacagaaaataataatttcagaaaataccaaaaaggatagtggtgactcgttactgtaatcacaccatcttaagacaacccttgtaatttaaagatgagcaaactgaagcgaaaagatgttattaaattgttaaagggcacaaataccattacatagtgattccaggctttgaatctctaaagccctatgctctttttaattctcctctgctgttatgggtgttggccttctaaaattacttaaaataccaaccttctaattttcaaaatgtgattcagttcacaagcatctaatttgtattaagcttttcagaaacttactgtttatatctgtttaataaagtgacttacacctacataatgtggtactttggtatagcaaagtattagaaaattcagagaaatttcatgtttatgcacaatggtaaacaaggaaatgtctgcattgaccataccctattaaaggttgatagttgctgtgatgagcagcaaattcattcaagacttttaataggttggaatgatggaaagttttgctaacagtataccttttgttgtttatattaaaacctagtggttgaatttgaaatgaataatagttctattttctgttaattttgtattataggcgtcattgatggytatgcagatgaaaaaactctttttgaaaggcaaattcaggaaaaaactgatataatagatcgtcttgagcaggagttgttatgtgcaagtaacaggttgcaagaattggaggcagagcaacagcagatccaagaagaaagagaattactgtccagacaaaaggaagctatgaaagcagaggcaggcccagttgaacaacgtaagtattttcagaatttgtatgaaacagtcctctgattttatttgtattcttcaaaggcttaaggtggcttttttcctctttcagtgccattattcatatattttatagagagatttaaaaaattataagaaaatctaccttagagataaatgtcttattagccaatcatgtggaatcaggttttttttttctttttccttaggcagatgttaacaggaaaagatagttcttcatttatcctcaaacttctgcttcaagagaaagctgcaaataatgaggcaggatattttaaaaattgtgtaaggtttagttctaatagcagagaggcagcaaaaatgtatacttggattaaatatctaaaagcactgatctggcactagtaatgagcaggtggaggggttttttgacttgcaagcagagtagatttaaaaaggtcagtggctggtaggctgacatctagtttaatgtagtaggaattcaaataatacttaaatgttt

SEQ ID NO: 141 - DNA, 2022 bp, Homo sapiens
  exon (501)..(653)
  exon (1342)..(1521)
ctatcttggcttccttctgcttaacaaaccacatggcagccaggccttttagtaagttaattagatatttttggactaaattgagttagtcttatatggtggctaacaaaacaaacagttctacaacttttctaggccttttgatagcaacttaatgtaacataaactaagatttaatatgtggactctttcccttcctcctatgactcttttctgcttcaggagaagagactaaggtaggaaatggctccttttatccttcctcaggaggtttcctctctgctttgtgtaggatagtttaaggatggccagtttgagcatgtctaggaaccacacaggtaacacagattatacctggcttagaaaaaccacattcctttattcttatgactcatgttttaagcatgcatactttgtaaagctaatatagcactcttcattttatcttgataaacgtttgtataaacattttttctcttttgataattttgttattaaagattacaaacttagaagagcaattagaacagtttagagaagaactggaaaataagaatgaagaagttcaacaattacatatgcaattagaaatacagaaaaaggaatctactacccgcctacaagaacttgaacaggaaaacaaattatttaaggtaattagttaagaaaaacttttatctgtaaataagtcatagtttcagtcctatattgctttattattattattattattatttctttctttttttttttttttttgagacttagtctcactctgttgcccaggctggagtgcaatggtgtgatctcggctcattgcaagctccgcctccctggttcaagcaattctgcctcagcctcccgagtagctgggactataggcacgtaccaccacgcctggctaatttttgtatttttagtagagatggggtttcaccgtgttagccaggatgctctcgatctcctgacctcgtgatccgcctgtcttggcctcccaaagtgctgggattacaggcgtgagccaccacacctggcccctatattgctttattaagcattcgataaatccagctgttaaataatactcaacagaggaacattaacaggcagacacatttgcatacagcttattttcagcccaacctgaacatttgaattcatcataaatgaaaattttgggatcatttatcaaaatattttagaattattgatttacagtaaccatatggtgtctctgattttattcatttgtacgttataggctctgatttcttttgtaattatgttctgaaaatgataggtaatgatatatccaactgtgataattatttttgttcctaggatgacatggagaaactgggacttgccataaaggaatctgatgccatgtctactcaagaccaacatgtgctatttgggaaatttgctcaaataatacaggaaaaagaggtagaaattgaccaattaaatgaacaagttacgaaactccagcagcaacttaaaattacaacagataacaaggtatactyatttaaaattgattatgaaattaatatgaaccagagttttaaagggcaaaatggttataatgttgctccccattgaatttaaaaaacaaaccaattttattttattttattttattttatttattttttttgagacagaatctcgctctgtcgcccaggctggagtccaatggtgcaacctcggctcactgcaacctccacctcctaggttcaagtgattctcctgcctcagcctcccgagtagctgggattacaggcacccaccatcacacctggctaattttttgtatttttaatagagatggggtttcaccatgttgaccaggctggtctctatctcctgatgtcaggtgatccacccacctcagcctcccaaagtgctggtattactggcatgagccaccacgcctggcccaattctcttttattaattttaatttattaagacacattggtggccaggcacagaggctcacacctgtaatccttatac

SEQ ID NO: 142 - DNA, 2175 bp, Homo sapiens
  exon (501)..(641)
  exon (1149)..(1674)
agtggcgcagtcttggctcattgcaacctctccctcctgagcagctgggactacaggtgtgcaccacaacacctggctaatttttgtattttttgtagagacagggtttcgccacgttgcccagactggcctcaaactcctggcctcaaatgatctacctgtctcagcctctcaaagtgctgggattacaggcgtgagccaccgtgcctggcctaaaatagtaatgtaactttccattttaggatgtatatgaataacattacttaccttttattcccagaaaatcattcttttctcaagaagaaaatcattgtctcaagaatataagatgatggttctgaaaaagcttctctgtttttggaaagagcattgatttgttccaactccttatatctgtaggcagtcattccttggatggttttattagaatgtataagagccttgaatttagctatrttttttttaaattatgtgtttcttgtgtttccgctgtcattcagacaactactgagctatttcatagcaatgaagaaagtggattttttaatgaactcgaggctcttagagctgaatcagtggctaccaaagcagaacttgccagttataaagaaaaggctgaaaaacttcaagaagagcttttggtaagataagtaacatagctcctaattcactcatttctacctatcttaattacgtttcaaagtatatactcttttataacaaatgagctccataacttaaaagctagataaaaagtattttgtggatttgatgaaaactttcattgttataaatttctttaccaacatcttcttgcttggttttcctggaaatctttcttaggaggatactttttatttccattctgttaatgaaggagtagaaagttgttaaagagaactgtatatcccatgagaaccaaaaatagaagctaataaaattatttcatttctatagtaatctatgaccatacgtacatacaaatatatatatgtaaactgtgagcgtttctgaaatgtttttcctactactctgaggaaaatgaacgtataatcatgaattacattcctcccacaccctttaaattctacatttaatatgggaagattttaactgaatgccctactgttctattcattacgttttaggtaaaagaaacaaatatgacatctcttcagaaagacttaagccaagttagggatcacctcgcagaggcaaaagagaaattgtccattttagaaaaagaagatgagactgaggtacaagaaagcaaaaaggcctgcatgtttgagccacttcctataaaactgagtaagagcattgcatcccagacagatgggactctgaagatcagtagcagcartcagactccacaaattcttgttaaaaatgcaggaatacaaattaatttacagagtgaatgttcctcagaagaagttactgaaataatcagtcagtttactgaaaaaattgagaagatgcaagaactacatgctgctgaaattttggacatggaatccagacatatttcagaaactgaaaccttaaagagggaacactatgttgccgttcagttactgaaagaggaatgtggtaccttgaaggcagtgatacagtgtctgagaagtaaagaggtatttggtttttataatatgtgtttttcaacattgtgtggttttttwaaaaaaaaaaatcagtttaattcattttgtagatgacaaaccaaaatgcaactcattaaggcacttgatctttctaagtaggtgtattatcaaggcaagttttaaactcctagtacaatattccttttttttcttttgttatactttaagttctgggatacacgtgcaggatgtgcaggtttgttacacaggtatacacgtgccatggtggtttgctgcacccatcaacccgtcatctacattaggtatttctcctaaagctgtccctcccctagcacctcacccccgacaggccccagtgtgtgatgttcccctccctgtgtccatgtgttctcattgtttaactcccacttatgagtgagaacatgcagtgtttggttttctgttcttgtgttagtccgctgagaatgatggtttccagcttcatctatgtccctgcaaatgacatgaacgcatccttttttatggctacatagtattccatggtgtatat

SEQ ID NO: 143 - DNA, 2599 bp, Homo sapiens
  exon (501)..(622)
  exon (1177)..(1368)
  exon (1910)..(2098)
ggttttgaacttttttaaatttaaagagtttttagttttaaatttctttaaatctttccattgcatagagttaaataatatatgatgttcctgtatggatttggaacatgttatctttccttaattcatgagtatctcttcttatggtaatattcatgaagaaacagacttgttaaaaaaaaaaaccatgaataatttcatttattatgaaaggtgtgacagatttgattgattacagcacgggaaaccagcaaaataattcattgtattctatttttattaaagcaaaaaatatatgtactttttgttttctctaattagggatcctcaattcctgagctagcacattctgatgcttaccagactagagaaatatgctccagtggtaagttatataaatatttgtaatgtttgtagtagttgtttaagaaataatagttttttggggactggggtttgatttttttttttttaacagcaaattattttctttattttagattctggatcagactggggtcagggaatttatcttacacacagtcagggatttgacatagcatcagaaggccgaggagaagaaagtgaaagtgcaacagattcctttccaaagaaaataaaggtactaaaagatagataccttttattaactcagccagtgttgtttctatgttgaacatagcagttcattagaagttatatggtgggatcatttctgaagagagaattgcttagctagaaggaatctgagagatctattttatttccacatttcacagataataaagtaagagattaatgataatatgtatgaagactttttttcttaataattcttattcctgatgtattcgtttgccagaatttttaaagtagtctcaaagagtagaagttagagcccatgtatttattttggtcaaatcagtagcttatcagtaaacctaggaagagtacattagccaaacagaaggaacttagagatgagagctatggaaagtcataggccatctgctggggttggcttacccctccacaggaagaaggcattcagtaatgttgggctggagttttctctctgcaagctatcttgcttaaaatttatttctgtttgtaagtctaatttttcagtctgtgaagaagttgtcataattctggctcttgggttttggtttccagggattactgagagctgtccataatgaaggcatgcaggtgctttctctcactgagtctccctatagtgatggagaggaccattctattcagcaggtttcagaaccttggctagaagagagaaaagcttacatcaatacaatctcatctctaaaggatttaattacaaagatgcaactgcaaagagaagccgaggtaaccaaagaatactatgcatttaaatcattttatgtattatttgaacaataataatacattataaattaaattatcttttatacatatttttgcatgaataactatatatatatattttcacacttgaaactcagccagaagcagtgcctcatgcctgtaatcccagcactttgggaggccgaggtgggtggatcacctgaagtcaggagttcaagaccagcctggccaacatgttgaaacccgtctctactaaaaatacaaaaattagccaggcgtggtggtgggtgcctgtaatcccagctactcaggagaatcgcttgaacctgggaggtggaggttgcagtgagctgagatcatgccactgcactccagcctgagcaacagagtgagactgtctcaaaaagaaaaaaataaataaataaaagaagtacacatgctcctaggcttttaattatttttctttgtagattaatatttttagaatgtttttaaaacatgcttatttgaaaactaactatcgttatatgtactttgctaggtttatgatagttctcaatctcatgagagcttctcagactggcgaggtgaactactgcttgcccttcaacaagttttcttagaagagcgtagtgttttactagcagcatttcggacggagytgacagctctaggtactacagatgcagttggtttactaaactgtttggaacagagaatacaagaacaggtataatgaaacttcattttaaaaacactttaatagaaataaggaaatgactattgattttagagtcttaatttaagtatgaaggttaagattttaataggagccactatgaatattttaaaaaaattattgtaactattttaacgtattatgttagaaggtaagaaagactgaaagttaatgagcttattttctaacctaggaaattagaaaaagagcaacagaataatcccaaacaaatttgagagagtaaattctcattatttgcactggttatgttccataaagttgctctgaacattgagcggtcattgctcctaagggaaatacaaggttaggttcctgtaagcctttggtcacaacattttcatcagtcagcacataaccttgtctatatgtgattctattttaagacaccttatttactatatattattgattgattaaccttgaacaccaccaacagcactataactcatgcctgaaaaaaacttgtctgac

SEQ ID NO: 144 - DNA, 2258 bp, Homo sapiens
  exon (501)..(1738)
aagatggtatcattgggaaaagctggctaacagatacatgggaactttagctttaattaattcaaaataaaaagttttttaaaattgaggaacgtacaacaaaatagcctgtagtcttcaaaaattcaaggtcatgaaagacaaagaaagacttgggaatatcactttttttctttttgctgtgaagtacatttcacaaaatttgaataggctctgtatatcacataatagtattgtagtaatgttaattccacttttgctaattgtagttatgtaaaagaatgttcttgttttaaggaaatacactctggtatttagaggtaaatgagcatttgtctgcagcatatcctcatacattttggaaaggaaaaataagaaaattttttaaaaaagaaaattttagtatgtgtgttccattcattcttctttagatttcttggttgttaattgtattgcctttacattgctcttcacttgttttttaccttcctttgttacagggtgttgaatatcaagcagctatggaatgcctccagaaagcagatagaaggagtttgttatctgaaattcaggcactgcatgcacaaatgaatggtaggaaaattactctgaaaagagaacaagagagtgagaaaccaagccaaggtatgttgtatgacaagctcatatggttacacaaacaggtgaaaagatttcactttgttttctttcttattattattaagttaaaacatattttcttggtcacattttcttctcattctcataatgttaaggatacaatctatattaattactctaggggttagaggattgtctaattggtttaaacagctacgttgactttaaaataaactgccattcccctgataaggttaagcccattggattcattctttttctttattttagagctgtatgttaagaaaacagtctttccaatcataaaacagaaaatactctttagagraaaatccacaatgcatgtaactaattattttttaatccttttttaaaaaaattgtgagccataacatacagaaaattacaaattgcaaatatgcagtatgacgcatttttaaatgagtatctatggaaacatcacccatgtgaatatagccagtatcccaacagccccttctcccaagcacatgctcctctgagtaacttagaggtaatcattgttctgatttttctttagttttactatctatttatatattcctaaaacatttaagtttcaagtttttttctgtttttgaactttatcaatctgtatgtattttttatcttgtttctttcacctctctgtaacattcttccaacattcttccaagttactgcatttttcaagttactgcattcttccaaattagtagtagaacattcttccaagttactgcatttatytctagttcattcattcttgttactctataactctatgaccctgtgtagggccaggcacggtggcttacacctgtaatcccagcactttgggaggctgacgtgggtggatcacgaggtcagaagttcaagatgagcctagccaaartggtgaaacccagtctctactaaaaatacaaaaattagccaggcgtggtggcgggtgcctgtaaggccagccactcaggagactgaagcagagaattacttgaacccagaaggtggaggttgcagtgagctgaaatcacaccactgcactctagcctgagcgacagagcaagactccatctcaaaaaaaaaaaaaaaaaaaagaatttcctgtatagatactccaaaattaatatatccattctattaatatgattgagcatttgggttgtttctactttttagctgtttagctatcaatgttattataaacattgttgtatagtgtttctgctacatatgtgcatgcatcttctgagtatatgactaagagcagaattgctgggtcatggaatgcctatcttagataaggtcaaatgattttcctacatagtcatattagtttatacacttagtagcagtatatgagagttacgttgcttcacatctttgccaacagttagtatagtcagacttctgttgccaatctgatgggtgtgcagtggattcttattgtggttttaattggctgttctctagttcctgaagggtttagtcctttttcatatggtaattggctagttggatttttatttttgtgatatgcttgtttaggtactttttgataacagtatctggtcttttaaattgagctacagatggaa

SEQ ID NO: 145 - DNA, 2647 bp, Homo sapiens
  exon (501)..(1169)
  exon (1398)..(1606)
  exon (1921)..(2026)
ccttcttttatttatatttcatgattatgcactaactactgaacatttaagttaataaactaaataatcagttctattttctaataaagatactaccaacatagtattaataaaggcatgccttcttttatttatatttcatgattatgcactaactactgaacatttaagttaataaactaaataatcagttctattttctaataaagatactaccaacatagtattaataaaggcatggttgtatacttctgaagttttttttgtttttttttttttttttgagtcaaaagtctcactctgttgctcacgctggagggcagtggtgcaatctaggctcactgcaacctccacctcccgggttcaagcaattcgcctgcctcagcctcccaagtagctgggactacaggcacgtgccattgcacccagctaatttttttgtatttttagtagagacagggtttcaccatgttggccaggctgggcttgaactcttgacctcaggtgatctgcccgcctcggcctcccaaagtgctgggattacaggcgtgagccaccacgcccggccaagtatttttaataatattaacaagttcttaaatttgattttctcgtaccaggatctgaagttttcacttgagagtcagaaacaaaggaatcttcagctaaatctacttttggaacaacagaaacaactactgaacgaatcccagcaaaaaatagaatcacagagaatgctatatgatgcccagttgtcagaagaacaaggtcgaaacttagagcttcaggtacttcttgaatctgagaaagttcgaattcgggaaatgagtagtaccctagatagggagcgggaattgcacgcacagctgcagagcagtgatggtactggacagtctcggccacccttgccctcagaggacctactgaaagagctgcagaaacagctagaggaaaaacacagtcgcatagtagaattgttaaatgagactgaaaaatataaactggattctttgcaaacacgacagcaaatggaaaaagataggcaggttcacaggaaaacactgcagacagaacaggaggccaacactgagggacagaaaaaaatgcatgagctccagtccaaagtggaagatcttcagcgccagctggaagagaaaagacaacaagtttataagttagaccttgaaggacagcgactacaaggaatcatgcaggaattccagaagcaagaactagaacgagaagaaaaacgagaaagtagaagaattctgtatcagaaccttaatgaggtaaactgacagtttctttttagatatttttaaggaaagcactgcagccctttgatcattaaattttgatattggattaaattacttaaatagctatatgtaaatcacttaaaaatgaaatctatagaagtttattggatataaacaataattgtgttcccttaagatagactgtgatatgctgttcacttataattattgttttcttattctgtccaaaattgccagccaaccacgtggagcttaaccagtgatmgaactagaaattgggttcttcaacagaaaatagaaggagaaacaaaagaatcaaactacgctaaattgattgaaatgaatggaggaggaaccggctgtaatcatgaattagaaatgatcagacaaaagcttcaatgtgtagcttcaaaactacaggttctaccccagaaagcctctgagaggttagacttttctgcctgatctttgggaaagtagtattcttaggctgggtagaccccatgcctctgggacagctagccaagggtggggaattgaaattttaaaggtaatgcgtgtttacattaggaggtgatattctttaacagaactcaaatgtctgaaaacaactatctaacactttgacccagggaagaaagcatgggatataagggagaagtgataggtgaagtagaacgtcgcctgctctgtaatgtttgtggtagtaaacacccccaattragaaggtatgttttgactttttgtctttttcttgaagactacagtttgaaacagcagatgatgaagatttcatttgggttcaggaaaatattgatgaaattattttacaactacagaaattaactggccagcaaggtgaagaggtaatactttttaaaagttatttctgaagcattgagagcaaagatttaatagaaactggataatttgaaacttgcagcatattctttatactctttatagagttttatttgtatctttttatttattttaaatatgaataataatgcttgctttcccccaagagaagataatgaaagcttagggggggaattagctttcattattgtcattgaataattatgttgaccttttactgtatggagacaagcttcctgaaagagtgatctggcttctatcctgtctactccatgaaacacccttagactcctacagtgtctaaacaattgactagtctggtgaatcttttcagtttatctcttgacttctttgtagcatttgatacttttgacctgttttattttcttaaaaccctctctttccttgcctgtcatgtcagtattctagcatttcttctgcttctttcatcagttgcctttatgattcctcttcctaccctcttc

SEQ ID NO: 146 - DNA, 1131 bp, Homo sapiens
  exon (501)..(630)
aatagatttggtaccctacacaaagtattttgaaatatcattacactgaaacagctgaaatttgtaccataataagttgtgttttattaaaagttagcaaatcttggtttcaagtcagtagattggaatggttacattggtctaatattttttatccacatcatttcccacaagccacacccactcagacacccctcacctctcatctacttagagctaaggtctttaaagaagaaaatatgccaattaaataattttctttgagacataattccagatatcagaaatactcatattcaaaagtaaacaaaataacatttgaaagccgaatttttgtttgtactgttttctcctttatcaagaataatagaaaatgactataaataggagattgtataatatagtataatagtcttttgagcagttacctattttgtagaaattttttaaggtcttgggattttatttttctttacaaggaatattttgggttactttaggtgcagaaaagactgactcattttatcattcttctggtgggctggagttatatggagaaccaagacatactacgtatcgctcaagatcagatctggactatattaggtcccctttaccatttcagaataggtaagaatatgagaaaacctgcctggaattgttaaatgtattaatatttaacagagawaaatggacatttttagggctttgacttctttgcattgagatagacatctttgttatatataatttacataatatgaccaagtgcggtggctcacacctataatcccagcactttgggaggctgaggcgggcagatcatgaggtcaggagttcaagaccagctagttggagactagcctggccaacatggtgaaaccctgtctctactaaaaatacaaaaaattagccaggcgtggtggcaggcgcctgtggtcccagctacttgggaggctgaggcaggagaatggtgtgaacccgggaggcggagctggcagtgagctgagattgtgccactgcactctggcctgggcaacggagcgagactctgtctcaaaaaaaaatacaaaaaaattagccaggcatggtggtgggtgcctgtaatcccagctactcaggaggctgagg

SEQ ID NO: 147 - DNA, 1884 bp, Homo sapiens
  exon (501)..(1383)
tttttctattagaattagattaagtctaaactaattgataaatagctgttttgcttttggaaaataatgataaagtagctttatgttgttttagagttgtaattaagaaaaacaccattttaaaaattatgtttttgtttaataataaaatatcacatgctttatgggataaggaatagaattgctttcgtatttgtttacaatattaatgctgacagatttttacaaaatgtgttatggttgaattgtttttttttttttttttactattaaagattcatgatgagatttcagtgtcaagcatggatgcttctagacaactaatgttgaatgaagaacagttggaagatatgagacaggaacttgtacgacaataccaagaacatcaacaggcaacggaattgttaaggcaagcacatatgcggcaaatggagagacagcgagaagaccaggaacagctacaagaagagattaagagacttaatagacaattagcccaggtaagggtcttgtagtcccctttctctccccagttatttttttttccaaacaccaacttgaaccagatccccaattaaaacaacagtattttttatgtagccataatttttttttttttttgccgaaatctgaataaactacatatatttagcatcaggaacacactctatactaagacagcagctttagatcttgttagggacacctatctcaaccttggagtgggcattgtctttctgtcattttatttaactcctttttcaagcactggaaaagtggctacacggttttgtttttttcttttaaatcattccattagccatatatagcaaactcactttgacattttggaaataacattgtgctgaggtgctccattatgcagttactatcattcagttttactatcttcatttatagttttgtgagtccaccaattagcatctcgaaggtttacctttatctgtctttaatccatctttttaatcatgaatggaaatcggaagtagtatgcttctgaaactctttccagggaaacatctcttcttgatttgagaaatgcaaatttatttaacattcttatccctttcttgactaaatttaaatacttcttggtatttgggagctggattcttgtcaactgctgtataaaatatactcacaaaaccattgcagaaaagcaagaaatatttatgtagaagttcttatgaaaacttattgaatttaattttgaaaactgaagctaagagagataataaatatctagagataactattaacagtaytctttcaarcataaaataatargataattgggagctgagcataaaacattatttggaaaaattaactttgcttttcttcattgcattttgtgaattcaaacttcttaattttcaatgcaaaattgacaaaaattaattgaactgcacaaattcctgaatatatagacttaattggcttttaaaaaatattttaaattttgcattgatctttgtatatacttttaaccccttacgatggaatatgaatcataagtagaaccagggcctgttggtcccgggggttaaaagaaatctgcttaatatttctaccctttttctctatcacaaacagtattctttcatgaccttttttcttatttagagatcctccatagataatgaaaacctggtttcagagagagagagggtgcttttagaggagctggaagcactaaagcagctgtctttagctggaagagagaagctgtgttgtgagctgcgcaacagcagtacgcaaacacaggtagtatggactttgccccacctaggagcaatggatcaccaattcagtaggatttgtttgtctttgttgttggtatgagatgtattcttttatagg

SEQ ID NO: 148 - DNA, 1064 bp, Homo sapiens
  exon (500)..(563)
gcaaatgacatgaacgcatccttttttatggctacatagtattccatggtgtatatgtgccacattttctttatccagtttatcattgatgggcatttgggttggttccaacactgtgtgcttttaagagaaaataaaaaaacgggggcagtctcttccttatgatcgcaattttaatggttttgaacttttttaaatttaaagagtttttagttttaaatttctttaaatctttccattgcatagagttaaataatatatgatgttcctgtatggatttggaacatgttatctttccttaattcatgagtatctcttcttatggtaatattcatgaagaaacagacttgttaaaaaaaaaaaccatgaataatttcatttattatgaaaggtgtgacagatttgattgattacagcacgggaaaccagcaaaataattcattgtattctatttttattaaagcaaaaaatatatgtactttttgttttctctaattagggatcctcaattcctgagytagcacattctgatgcttaccagactagagaaatatgctccagtggtaagttatataaatatttgtaatgtttgtagtagttgtttaagaaataatagttttttggggactggggtttgatttttttttttttaacagcaaattattttctttattttagattctggatcagactggggtcagggaatttatcttacacacagtcagggatttgacatagcatcagaaggccgaggagaagaaagtgaaagtgcaacagattcctttccaaagaaaataaaggtactaaaagatagataccttttattaactcagccagtgttgtttctatgttgaacatagcagttcattagaagttatatggtgggatcatttctgaagagagaattgcttagctagaaggaatctgagagatctattttatttccacatttcacagataataaagtaagagattaatgataatatgtatgaagactttttttcttaataattcttattcctgatgtattcgtttgccagaatttttaaagtagtctcaaagag

SEQ ID NO: 149 - DNA, 2792 bp, Homo sapiens
caccctcaggcactacagctagactccgagcttactgggcagtcatctgattcgaccaacatcagttcgcagggcttaagcccagtcccttacggcggcctggggagggaccaggcccaagtatataaagctccctgagggtccgcgttggctttgcgcctgtgagtgtgattcaagaacgtcccagtgcccttggctcctttcggagtgtgaccccgtgcttgcacgggacacgttacccagctcgggtgagaagggtatcttccgggaacctcgcctttaatagcacaacgagcgcagagtccactggatctgcgagaagaaaccgcgctaactagtttgtccctacggccgcctcgtagtcactgccgcggcgccttgagtctccgggccgccttgccatggctgcccgtggtgtcatcgctccagttggcgagagtttgcgctacgctgagtacttgcagccctcggccaaacggccagacgccgacgtcgaccagcagagactggtaagaagtttgatagctgtaggactgggtgttgcagctcttgcatttgcaggtcgctacgcatttcggatctggaaacctctagaacaagttatcacagaaactgcaaagaagatttcaactcctagcttttcatcctactataaaggaggatttgaacagaaaatgagtaggcgagaagctggtcttattttaggtgtaagcccatctgctggcaaggctaagattagaacagctcataggagagtcatgattttgaatcacccagataaaggtggatctccttacgtagcagccaaaataaatgaagcaaaagacttgctagaaacaaccaccaaacattgatgcttaaggaccacactgaaggaaaaaaaaagaggggacttcgaaaaaaaaaaaagccctgcaaaatattctaaaacatggtcttcttaattttctatatggattgaccacagtcttatcttccaccattaagctgtataacaataaaatgttaatagtcttgctttttattatcttttaaagatctccttaaattctataactgatcttttttcttattttgtttgtgacattcatacatttttaagatttttgttatgttctgaattcccccctacacacacacacacacacacacacacacacacgtgcaaaaaatatgatcaagaatgcaattgggatttgtgagcaatgagtagacctcttattgtttatatttgtaccctcattgtcaatttttttttagggaatttgggactctgcctatataaggtgttttaaatgtcttgagaacaagcactggctgatacctcttggagatatgatctgaaatgtaatggaatttattaaatggtgtttagtaaagtaggggttaaggacttgttaaagaaccccactatctctgagaccctatagccaaagcatgaggacttggagagctactaaaatgattcaggtttacaaaatgagccctgtgaggaaaggttgagagaagtctgaggagtttgtatttaattatagtcttccagtactgtatattcattcattactcattctacaaatatttattgaccccttttgatgtgcaaggcactatcgtgcgtcccctgagagttgcaagtatgaagcagtcatggatcatgaaccaaaggaacttatatgtagaggaaggataaatcacaaatagtgaatactgttagatacagatgatatattttaaaagttcaaaggaagaaaagaatgtgttaaacactgcatgagaggaggaataagtggcatagagctaggctttagaaaagaaaaatattccgataccatatgattggtgaggtaagtgttattctgagatgagaattagcagaaatagatatatcaatcggagtgattagagtgcagggtttctggaaagcaaggtttggacagagtggtcatcaaaggccagccctgtgacttacactgcattaaattaatttcttagaacatagtccctgatcattatcactttactattccaaaggtgagagaacagattcagatagagtgccagcattgtttcccagtattcctttacaaatcttgggttcattccaggtaaactgaactactgcattgtttctatcttaaaatactttttagatatcctagatgcatctttcaacttctaacattctgtagtttaggagttctcaaccttggcattattgacatgttaggccaaataattttttttgtgggaggtctcttgtgcgttttagatgattagcaataatccctgacctgttatctactaaagactagtcgtttctcatcagttgtgacaacaaaaatggttccagatattgccaaatgccctttagaggacagtaatcgcccccagttgagaaccatttcagtaaaactttaattactattttttcttttggtttataaaataatgatcctgaattaaattgatggaaccttgaagtcgataaaatatatttcttgctttaaagtccccatacgtgtcctactaattttctcatgctttagtgttttcacttttctcctgttatccttgtacctaagaatgccatcccaatccccagatgtccacctgcccaaagtctaggcatagctgaaggccaagctaaaatgtatccctctttttctggtacatgcagcaaaagtaatatgaattatcagctttctgagagcaggcattgtatctgtcttgtttggtgttacattggcacccaataaatatttgttgagtgaatgaaaaaaaaaaaaaaaaaa

SEQ ID NO: 150 - protein, 150 aa, Homo sapiens
MAARGVIAPVGESLRYAEYLQPSAKRPDADVDQQRLVRSLIAVGLGVAALAFAGRYAFRIWKPLEQVITETAKKISTPSFSSYYKGGFEQKMSRREAGLILGVSPSAGKAKIRTAHRRVMILNHPDKGGSPYVAAKINEAKDLLETTTKH

SEQ ID NO: 151 - DNA, 101 bp, Homo sapiens
gcgcagagtccactggatctgcgagaagaaaccgcgctaactagtttgtctctacggccgcctcgtagtcactgccgcggcgccttgagtctccgggccgc

SEQ ID NO: 152 - DNA, 101 bp, Homo sapiens
agtacttgcagccctcggccaaacggccagacgccgacgtcgaccagcagggactggtgagtcctgccagcggcccccacccctctctggctcccttgtag

SEQ ID NO: 153 - DNA, 103 bp, Homo sapiens
ataatatgtatatcaaaatatgctgtgaattcctttcagattaaagtcattatatatgatatatagttgagatggaagtttgtgcgccacatgtattgtgatt

SEQ ID NO: 154 - DNA, 3533 bp, Homo sapiens
  exon (1501)..(3032)
ctgttaaaagtggccattccctcctgtaaagtccaagagcactatggttgtaattcttttcataagtgcattatacaagttgcttccatatcctgtcgttttcttttttatccctatgtaaatgaaaagttctctgaaaaggaatttagaggagagagactatcccaataaacagtttgcaaacctgagagccacagatttcagtgtaaaaggaaggtttggctctattttaagttagtcctagttagccacttgggatccatcttgaaggattggttctttgaggtttatatttgtttgcacaacttccctgagtcagaatgttggacaaatgttattctccttttacaggtaatttggagaggttaatggatatgttcagttatacaagcccagaaaataatggaggtacactagaactcagatgtcttccttattcctgtaaccacccaatgggtttactttgctggctgtctagacagagccaaatttataaagacggggtaattgcaatagagaaagagtaattcatgcagagctgactgtgcaggagactggagtttcattattactcaaatcagtctcccagagcattcagggatcagaattttttatttatttatttattattattatttttttgagacggagtctcactctgtcctcaggctggagtgcagtggcgcgatctctgctcactgcaacctctgcctcccaggttcaagcgattctcctgcctcagcctcccgagtagctgggactacaggcacccaccacgcccagctaatttttgtatttttagtagagatgggatttcaccatgttggccaggatggtctcactctcttgacctcatgatgcacccaccttcggcctcccaaagtgctgggattacaggcatgagccaccgcgcccagctggggatcagaatttttaaggacaactcggtgagtagggggaagccagtgagctgggagtgctgattggtcaggtcaaagatgaaatcacagggagtccaagttgtcttgcgttatcagttcctgggtgggggccacgagatcagatgagccagtttatcgatctgggtgatgccagctgattcatcaagtgcggggtctgcaaaatatctcaagcactggtggtagtttttacaatagtgatgttagctccagcagcaatttggggagggtcagaatcttgtagcctccagctgcatgactcctaagtcataatttctgatcttgtggctaatttgttagtcctacaaaggcagtctagtccccaggcaagaaggaggtttgttttgggaaagggcttttatcatctttgtttcaaactataaactatgaattacattcctcccaaagttagtttggcctacggccaggaatgtacaagacagcttggaggttagaagcaagatggtgttgattaggtcagatctctttctcagttgtaattttgcaatggcggtttaattcccagtccagttctctttatactgctatgcaatgcatgtgctcatgttctggtatgtactattattctgtgtcagtgttatcttccctacaagattgtaaatttctaggacctaacttcttagacatgctaataatattaactaagtgaacaaattaatagaccctcaaaactttaaattcaggaatagaaaaaaaataaagctttttcttcctgtcagctgattttgcaaagggtataaggagccaaagagctgccacgttggtacagaagttggaaaacaccatacgcttcaactgctggttaatttttgctctaaaaacttgatggaggccaggcgcggtgactcacgcctgtaatctcagcactttgggaggctgaagcgggcggatcacctgaggtcaggagtttgagaccagcctggccaacatggtgaaacctcgtctctactaaaaatacacaaattagccaggtgtggtggcacgtgcctttaatcccaggtactcgggaggcagagggtgcagtgagccagagattgcgccactgcactcagcctgggcaacagagcgagactccatctcaaaaaaaaaaaaaagcttaataataaaatgggcttttatatatacaaatcagcacaaactcatttgagggagagtaagatttacctacttgctcacaactttttttcccctgcctcaggctcctgagtagctgggattacagggacgcaccaccacacccagctaatctttgtatttttagtagagacgaggtttcaccatgtcggccaagctggtgtgatccacccgcctcggtctcccaaagtgctgggattacagcgtgagccaccgcacccggccacaactttcttctgtgtaatttcaccttaaatacagccatttacttgggggtggagtaagcaaattgcctctttaatttctctcccggggtggtagaactgtggcattaaacagaagtgcgaacagaagttgagagtgggaagaaaggctgcccggaagggggtcaggaaagctcaggcaagcccaccctcaggcactacagctagactccgagcttactgggcagtcatctgattcgaccaacatcagttcgcagggcttaagcccagtcccttacggcggcctggggagggaccaggcccaagtatataaagctccctgagggtccgcgttggctttgcgcctgtgagtgtgattcaagaacgtcccagtgcccttggctcctttcggagtgtgaccccgtgcttgcacgggacacgttacccagctcgggtgagaagggtatcttccgggaacctcgcctttaatagcacaacgagcgcagagtccactggatctgcgagaagaaaccgcgctaactagtttgtcyctacggccgcctcgtagtcactgccgcggcgccttgagtctccgggccgccttgccatggctgcccgtggtgtcatcgctccagttggcgagagtttgcgctacgctgagtacttgcagccctcggccaaacggccagacgccgacgtcgaccagcagrgactggtgagtcctgccagcggcccccacccctctctggctcccttgtagtttctgcttcagccccctctaccgcctcacccttgaacctttgtactcccccgcattcgctcacggtctgtgccctagcgctcacttgttcagtggagagaccgctttgtgctgggctttgacgcctgggcgtggaagacggagcagttctgaggatctgtctcctcaaggagcttccagtcttgtctgggacacaaaccagaaaacaggcaattgcaaatacagtaaaataagtgctgtatgtggattttcctatctcataggaggccctaaaaacgtcttgcaggggacgtggtgggatcagggacgcttcttggagaaagctgtagttaaaaattaagatctgaatgaataaaaacagtccattcagcaaggagaaggggaaaaagtgtttcgggtaccaggactactgtctccaaagtctccggcacagaaacagggcccagttggaaactc

SEQ ID NO: 155 - DNA, 1075 bp, Homo sapiens
  exon (501)..(571)
ggagaatcacttgaacctgggaggtggaggttgcagtgagctgagatcatgccactgcactccaacctgggcaacagagcaagactcctccttcttggggggtggggggggaaagtccagcagtatgcctctggaatccaaatacttgtctgctacaccgtatataccgccttccccccaaataacttagaagcataagttttcaaacttacagtattgtctgcagaagctgactcccctaacctatatgttgttttgttttttaaattgattgagaataaggattggcattacaaaggactgaagaaaaacacatgtaacattgaatcaatgatttattttgatggttagtggaattaagtggaaagctgtagtttcatatttgtccacaagatggtgaaattctcattaggtataattttttgaaacccatataaacccttaatttataatctgcatttgatgctatttattataagcactgtaatttctttttacagcccatctgctggcaaggctaagattagaacagctcataggagagtcatgattttgaatcacccagataaaggtaggtagaattcctatttttcataatatgtatatcaaaatatgctgtgaattcctttcagattaaagtcattatatatgatatatagttgagatggaagtttgtgcgccacatgtattgtgatttttttctcataaatgagcatttaggttggagttcagtgattcacacaagtagtggatttatattatctgctttcaagaacttagttgctggtttttatatatgacttcctgaaccatctgatgcgcctaccatttttatcaagaaaaatcgaaaacacgagttatggactctttggttgtataaactgatttgggcatcacgaattgtatttatgtaaccttcaatgtaaaagcacaagagttagaggatttcctccaaatctgtgaatgtaatatgtcatagatgattctgaatttctgaattttattctggaaggctctgaggctgagccatttgtttttaactggccaggtttttaatgtaaatttatcttacaga

SEQ ID NO: 156 - DNA, 3513 bp, Homo sapiens
ggggcggcagaggcaccagccgacccgtcagtgacaccgctgtgccgtccccaaaaccagccgagacagctggcccccacccttccacccattgggcaggccgcacgggggcgcggcccggagtcctggtccctttgttgggcgcgcaccccctcccttaggtggcaacaaagtcgtgcagtgggagccgccgcgatagggcggggagtggccagggcgggactccaagaactgcccgggggcagcggggccaaaaagtgggaagaaggaaaaaaggcaggaggcatctggggacaggcgcgagggcagccggctctgaagtatgcggagggcctcctcccggccccgggcattcgcggagaacgagcctcgcagaagtttggctgcagctgcccgggcggcgtcgatggctgcgcgccccgcgccgcgcgggggctgagcgggcgccacttcccctccgggccggcttttgtgtctggcatctcctcctcatgctgcgtctggccacctactgcggcggccgctgctgagacgctcgctcggaccaaggggaggagacggcgggggcggccgcggctttgggtccaggcgggactatgggaaacgggatgtgctcccgaaagcagaagcggattttccagacgctgctgctgctgaccgtcgtgttcggctttctctacggcgcgatgctctactacgagctgcagacgcagctgcggaaagccgaggcggtggcgctcaagtaccagcagcaccaggagtccctctccgcccagttacaagttgtatatgaacacagatcaagattagagaaatccttgcaaaaagaaagacttgaacataaaaaagcaaaggaagattttcttgtttataagttagaagcacaagaaacattaaataaaggaaggcaagattccaatagcagatacagtgcactgaatgtccaacatcagatgttgaaaagccaacacgaggagctaaagaaacagcacagtgacttggaagaggaacatcgcaaacaaggggaagacttcagtagaacatttaatgaccataagcaaaaatacttgcagctccagcaagaaaaagaacaagaactttctaagctaaaagagactgtatacaatttgagagaagagaatagacaactaaggaaagcacaccaagacatacatacacagcttcaagatgtcaagcaacagcataagaatttactctccgagcatgaacaacttgtagtgactttggaagaccacaagagtgcactagctgctgcacagactcaagttgcagaatataaacaactgaaagatactctgaataggattccaagccttcgaaaacctgatccagcagaacagcaaaatgtgacccaggtggcacattctccacaaggttacaacacagcaagggagaagccaacccgagaggtgcaggaggtgtctcgaaataatgatgtgtggcagaaccatgaagcagttcctggaagagcagaagacacaaaactctatgctcccacccataaggaggcagaatttcaggctcccccagagccaatccaacaagaagtggaacgcagagaacctgaggagcatcaggtggaagaggagcacagaaaggccctggaggaggaagaaatggagcaggtcgggcaagcagaacatcttgaggaggaacacgatccatcaccagaggagcaggatcgggagtggaaagagcagcatgagcaacgagaagcagccaacctcctggaagggcacgcgcgtgctgaggtgtacccttcagccaagccaatgatcaaattccaatcaccctatgaggaacagttggaacagcagagactggcagtgcagcaggtggaggaggcccagcagctgcgggaacaccaggaagctttgcaccagcagaggctgcaggggcacttactacggcagcaggaacagcagcagcagcaggtggcaagagagatggccctgcagaggcaggctgagcttgaggagggccggccgcagcaccaggagcagctccggcagcaagctcattatgatgctatggataatgatatcgttcagggagcagaggaccagggaatccaaggagaggaaggagcctatgaaagagacaaccagcaccaagatgaagcagaaggagatccaggtaatagacatgagcctcgtgaacaaggaccccgagaagccgacccagaatctgaggcagatagggcagctgtagaagatataaacccagcagatgaccctaataatcaaggtgaggatgaatttgaagaagccgagcaagtgagagaagaaaatttgccagatgaaaatgaagagcaaaaacaaagtaatcaaaagcaagagaatacagaagtggaggaacatttggtgatggcaggaaatccagaccagcaggaggacaatgttgatgaacagtaccaggaagaggcagaagaggaggttcaggaagatttgactgaagagaaaaaaagggaactggagcataatgctgaagagacctatggtgaaaatgatgaaaatactgatgataaaaataatgatggagaagagcaagaagttcgagatgacaaccgccccaaaggccgagaggaacactacgaggaggaagaagaggaggaagaagacggggctgcagttgctgagaaatcacatcgaagagctgaaatgtagcggcacccaatttctagacaacgctcagccaacggattcttttcaagctgctcaaacataaatctgcctactgaactctaggatatttaattacaaaaattaagaacttagacttttttaaaacttttgtattagaaatgcgcatacatttatatgaatatattttgataacgtaggtctagagcttcttttatattcaagctaaacatgaaaaagaagaaaaacaataaagtaaacctgagcccccacgtcccaatttttttaatagattatgtgatgttggaaagctcattgattttgtatatgtttcagcgtgttacctttctggcttccagttcccaggtgttctttgtttgcctttgataaaatacaggatttaagaacagagagtactgcaaaatgccatgcagactttaaagagaatggcctgtttactaattgctgcccttctgatgtctttatgtatagctctgatagaattttcaccagtctatgtatctctggagtgagatctatgtacaaagtgacatacaattggaaatccatttttgttgtaaagacattgtttttcagacttttcagatcaattagaaaaatgtcattgctttaaaatcatagctgttctgtttaagaggaattgaatttaaaaatgagagagtattaaaactcatgtggcagtatcctggtcttaatcaggtattgcagtgttcaaacaaggtatggacacatcaacatattcaccttttggaaggactagtgacttggttaaaaactaatgagtgtttgcgtgtggtgtttctatgcgagcacccattctcaatttttt

SEQ ID NO: 157 - protein, 696 aa, Homo sapiens
MGNGMCSRKQKRIFQTLLLLTVVFGFLYGAMLYYELQTQLRKAEAVALKYQQHQESLSAQLQVVYEHRSRLEKSLQKERLEHKKAKEDFLVYKLEAQETLNKGRQDSNSRYSALNVQHQMLKSQHEELKKQHSDLEEEHRKQGEDFSRTFNDHKQKYLQLQQEKEQELSKLKETVYNLREENRQLRKAHQDIHTQLQDVKQQHKNLLSEHEQLVVTLEDHKSALAAAQTQVAEYKQLKDTLNRIPSLRKPDPAEQQNVTQVAHSPQGYNTAREKPTREVQEVSRNNDVWQNHEAVPGRAEDTKLYAPTHKEAEFQAPPEPIQQEVERREPEEHQVEEEHRKALEEEEMEQVGQAEHLEEEHDPSPEEQDREWKEQHEQREAANLLEGHARAEVYPSAKPMIKFQSPYEEQLEQQRLAVQQVEEAQQLREHQEALHQQRLQGHLLRQQEQQQQQVAREMALQRQAELEEGRPQHQEQLRQQAHYDAMDNDIVQGAEDQGIQGEEGAYERDNQHQDEAEGDPGNRHEPREQGPREADPESEADRAAVEDINPADDPNNQGEDEFEEAEQVREENLPDENEEQKQSNQKQENTEVEEHLVMAGNPDQQEDNVDEQYQEEAEEEVQEDLTEEKKRELEHNAEETYGENDENTDDKNNDGEEQEVRDDNRPKGREEHYEEEEEEEEDGAAVAEKSHRRAEM

SEQ ID NO: 158 - DNA, 101 bp, Homo sapiens
tatgttgagttaacagaggtggaggtattgtagtctgtagaaaagtccaccggtggcttttctttgagttgaaagggaaatcctgtttgattcattttggg

SEQ ID NO: 159 - DNA, 101 bp, Homo sapiens
tctgctattttgagtgaactttttggaaatcaaaatatattattgcaagtgtttaaatgataacagtgtcaaaatatattatcgcaagtgcttgaaagaca

SEQ ID NO: 160 - DNA, 101 bp, Homo sapiens
agtgtttgtgggtgtgcatgtgtataggagagatatatgtatttgggataggtaccagtgggtaatggtacctctgagttaccactgaatttaacaggccc

SEQ ID NO: 161 - DNA, 101 bp, Homo sapiens
acttttgtattagaaatgcgcatacatttatatgaatatattttgataacataggtctagagcttcttttatattcaagctaaacatgaaaaagaagaaaa

SEQ ID NO: 162 - DNA, 101 bp, Homo sapiens
ggaaatccatttttgttgtaaagacattgtttttcagacttttcagatcagttagaaaaatgtcattgctttaaaatcatagctgttctgtttaagaggaa

SEQ ID NO: 163 - DNA, 101 bp, Homo sapiens
cagacttttcagatcaattagaaaaatgtcattgctttaaaatcatagctattctgtttaagaggaattgaatttaaaaatgagagagtattaaaactcat

SEQ ID NO: 164 - DNA, 101 bp, Homo sapiens
tttctctaaaagagtagtcatcattaatgttttaccctcatttctgtgtasttggagatgcctctttcaacgtagcccgatattttcctcttatgtggttc

SEQ ID NO: 165 - DNA, 101 bp, Homo sapiens
actcaggtgcagaccacactggcacccacactacacacataacccgcttgwatctgcactaccacctccttgaacaaatcaataataaacttgttttctct

SEQ ID NO: 166 - DNA, 101 bp, Homo sapiens
cattattccctagaggagagcctactctaaaaatttattaccctagaaaayggtgttattatccatttcaaaaatgtgaaaaatatgaacatctatagagt

SEQ ID NO: 167 - DNA, 101 bp, Homo sapiens
agatgtccctccttcattgctcttaattttgtttaagtttgttttgtgacrtggagaacaaatgcttttcaaaagcactttgagaagaattaccctccttc

SEQ ID NO: 168 - DNA, 1111 bp, Homo sapiens
ctgtggcggtcatcatcattactgtgatgacatcagaaaacatgtgatgggctatatttgtttctgagctccacagatggggcagttcttccttgcatttcctgaaactatcaatttcttcttttggagcccagctacttcctctgatattatcaaacattagttgatttcttcagcagtgtccaatcaactgggctttcttttattgagagagttttgattgttgttgttttcttgcatatgggggaaaaattacagctcctgtgaaaaatatttattttagaagaaaagtgtctgacccatatcatctctctagacacacagtctgtgaagagaacataaccttattcagaaaagccaggacataggccttatgttgagttaacagaggtggaggtattgtagtctgtagaaaagtccacyggtggcttttctttgagttgaaagggaaatcctgtttgattcattttgggctgattttagttcctttgatttgctagcctatgaaagagacaaccagcaccaagatgaagcagaaggagatccaggtaatagacatgagcctcgtgaacaaggaccccgagaagccgacccagaatctgaggcagatgtaagtatcctctcttctgcccctgacacatgtaaactcataaggtgggaaagagagttgaaaacttgcctgatgccagccttcagccccagatatttctgttatatcctcagcccagaaggaaaatggcttgcataattatatatgggcagtgtttttaactgtaaaccatggtgtacgtgtatgtgatgagctggtttaaaagttgctctgggggaaaaaaaaaaacaaaaccaggattttttttttctgatgacttttagattaataaaactaaaacctagaaaagcaaaactgagagacactgaaatatgtagtaactctgaaagctaggaggaataaaaggcaagtgtggaagttggagatgggaccagagaaaggaaactaacccttcctgagcatgttgagcagtctgctagagtgttaggtatttgtgtgactctctgtaatctcttagcagtctagtgaccattttaataaatatatggataaggatatgtg

SEQ ID NO: 169 - DNA, 2382 bp, Homo sapiens
  exon (501)..(581)
  exon (906)..(1881)
cagtatttgggtgggagtgacgcgattttccaggtgccgtccgtcacccctttctttgactcggaaagggaactccccgaccctttgagcttcccaagtgagacaatgcctcgccctgctttggctcgcgcatggtgcgcgcacccactgacctgcacccactgtctggcactccctagtgagaggaacctggtacctcagatggaaatgcagaaatcactgtcttctgcgtcgctcacactgggagctgtagaccggagctgttcctattcggccatcttggctcctcccttatacatttcttcacacctagtagataaatccttgacatattttttcaattgtatatttactttaattttgcttctgctattttgagtgaactttttggaaatcaaaatatattattgcaagtstttaaatgataacagtgtcaaaatatattatcgcaagtgcttgaaagacaaaagtgtttaaatgatatctgtggtttgttttaggttcaggaagatttgactgaagagaaaaaaagggaactggagcataatgctgaagagacctatggtgaaaatgatgaaaatgtatgaccgggatacatatttctattgagcacttgagtgtttgtgggtgtgcatgtgtataggagagatatatgtatttgggatasgtaccagtgggtaatggtacctctgagttaccactgaatttaacaggcccacctgaaattaggaaaagttgtgacaacatgaaaagtaggagagacagcagcactgttgcttacatatcatttttcttccttttttttcctccaaaaatgagtaatttttcatcctgtttttagagagaattatttatcactaactctatactatctcttagtttttcttttttcttttaattttaagactgatgataaaaataatgatggagaagagcaagaagttcgagatgacaaccgccccaaaggccgagaggaacactacgaggaggaagaagaggaggaagaagacggggctgcagttgctgagaaatcacatcgaagagctgaaatgtagcggcacccaatttctagacaacgctcagccaacggattcttttcaagctgctcaaacataaatctgcctactgaactctaggatatttaattacaaaaattaagaacttagacttttttaaaacttttgtattagaaatgcgcatacatttatatgaatatattttgataacrtaggtctagagcttcttttatattcaagctaaacatgaaaaagaagaaaaacaataaagtaaacctgagcccccacgtcccaatttttttaatagattatgtgatgttggaaagctcattgattttgtatatgtttcagcgtgttacctttctggcttccagttcccaggtgttctttgtttgcctttgataaaatacaggatttaagaacagagagtactgcaaaatgccatgcagactttaaagagaatggcctgtttactaattgctgcccttctgatgtctttatgtatagctctgatagaattttcaccagtctatgtatctctggagtgagatctatgtacaaagtgacatacaattggaaatccatttttgttgtaaagacattgtttttcagacttttcagatcarttagaaaaatgtcattgctttaaaatcatagctrttctgtttaagaggaattgaatttaaaaatgagagagtattaaaactcatgtggcagtatcctggtcttaatcaggtattgcagtgttcaaacaaggtatggacacatcaacatattcaccttttggaaggactagtgacttggttaaaaactaatgagtgtttgcgtgtggtgtttctatgcgagcacccattctcaattttttttttttttttttgtttgaagccattgattgatattcttgtttcagtgtctggttccctataagtaatatatatttcctctttaagctctgtgcctcaatatgcaatcactttgataataagtataaatatgaagacataccaaactgcaaataggattatttttcaaaactatatggtgaaacatatggtgatatgatagacttatggtttttctgtttgctgggattgggtctgctttttgcctatgtgtaaggcattttaatcattgtgaatataatagattccttaaaataagaaaattaaaaatcagaaacttcccttggagtagagacatttcagttgcaagcataaagatttttaaatatataacactaggttatataattcatatatgtgtggttttgtattaataatcaaattaataaaaacatttcattttctaccattgtatgaacgtaattttattttttaataaccacactcatagatggttttgattg

SEQ ID NO: 170 - DNA, 5394 bp, Homo sapiens
atgaggaggcggaggtcggcggtcgggtccgtctctgcccgcggctgtggcggcgccggcggatccagccttagcggtttctctctgggcggcggcggcggcggctcggttgacgcctcctccgccagctgagcccgcgggagcccaggacgccgcttccccgcccatccccgctccccgaggccggccgcctggtcatggcgcagccgggcccggcttcccagcctgacgtttctcttcagcaacgggtagcagaattggaaaaaattaatgcagaatttttacgtgcacaacagcagcttgaacaagaatttaatcaaaagagagcaaaatttaaggagttatatttggctaaagaggaggatctgaagaggcaaaatgcagtattacaagctgcacaagatgatttgggacaccttcgaacccagctgtgggaagctcaagcagagatggagaatattaaggcgattgccacagtctctgagaacaccaagcaagaagctatagatgaagtgaaaagacagtggagagaagaagttgcttcacttcaggctgttatgaaagaaacagttcgtgactatgagcaccagttccaccttaggctggagcaggagcgaacacagtgggcacagtatagagaatccgcagagagggaaatagctgatttaagaagaaggctgtctgaaggtcaagaggaggaaaatttagaaaatgaaatgaaaaaggcccaagaggatgctgagaaacttcggtccgttgtgatgccaatggaaaaggaaattgcagctttgaaggataaactgacagaggctgaagacaaaattaaagagctggaggcctcaaaggttaaagaactgaatcattatctggaagctgagaaatcttgtaggactgatctagagatgtatgtagctgttttgaatactcagaaatctgttctacaggaagatgctgagaaactgcggaaagaattgcatgaagtttgccatctcttggagcaagagcgacaacaacacaaccagttaaaacatacgtggcagaaggccaatgaccagtttctggaatctcagcgtttactgatgagagacatgcagcgaatggagattgtgctaacttcagaacagctccgacaagttgaagaactgaagaagaaagatcaggaggatgatgaacaacaaagactcaataagagaaaggatcacaaaaaagcagatgttgaggaagaaataaaaataccagtagtgtgtgctttaactcaagaagaatcttcagcccagttatcaaatgaagaggagcatttagacagcacccgtggctcagttcattccttagatgcaggcttgctgttgccatctggagatcctttcagtaaatcggacaatgacatgtttaaagatggactcaggagagcacagtctacagacagcttgggaacctcgggctcattgcaatccaaagctttaggctataactacaaagcaaaatctgctggaaacctggacgagtcagattttggaccactggtaggagcagattcagtgtctgagaactttgatactgcatcccttgggtcactccagatgccaagtgggtttatgttaaccaaagatcaggaaagagcaatcaaggcgatgacaccagaacaagaagagacagcgtccctcctctccagcgttacccagggcatggagagtgcctatgtgtcccctagtggttatcgtttagttagtgaaacagaatggaatctcttgcagaaagaggtacataatgctggaaataaacttggtagacgttgtgatatgtgttccaattacgaaaaacagttacaaggaattcagattcaggaggctgaaacgagagaccaggtgaaaaaactacagctgatgctaaggcaagctaatgaccagttagagaagacaatgaaagataagcaggagctggaagacttcataaagcaaagcagcgaagattcgagtcaccagatctctgcactcgtcctaagagcccaggcctccgagatcttacttgaagagttacagcaggggctttcccaggcaaagagggatgttcaggaacagatggcggtgctgatgcagtcacgggaacaggtttcagaagagctggtgaggttacagaaagataatgacagtctccagggaaagcacagcctgcatgtgtcattacagcaagcagaagacttcatcctcccagacactacagaggcactgcgggagttggtattaaaataccgtgaggacatcattaatgtgcggacagcagcagaccacgtagaagaaaagctgaaggctgagatacttttcctaaaagagcagatccaagcagaacagtgtttaaaagaaaatcttgaagaaactctgcaactagaaatagaaaactgcaaggaggaaatagcttctatttctagcctaaaagctgaattagaaagaataaaagtggaaaaaggacagttggagtccacattaagagagaagtctcaacagcttgagagtcttcaggaaataaagatcagtttggaagagcagttaaagaaagagactgctgctaaggctaccgttgaacaactaatgtttgaagagaagaataaagctcagagattacagacagaattagatgtcagtgagcaagtccagagggattttgtaaagctttcacagacccttcaggtgcagttagagcggatccggcaagctgactccttggagagaatccgggcaattctgaatgatactaaactgacagacattaaccagcttcctgagacatgacaccctcatggcaggattctagcctgcactttgggtttttaactcatctttagagcaacagtaattattatttaactcttaactgaagaaagagaagtcacaacaaaaggaagactggagaaatgcttacttctagagggagaagactgtgcggcacaggaaacagcaaacagtggggtgatctgcagcccagagaccttcaaatgcgaacactataaactccaggcttgattccaacaggcgtgggatcagatttggtgatggaaaaagcgctgtttccttgcctgctttctccaagacagattttcggaacacatttccctaccctaaagcgacatcccagtagtgtttggaattttctgttcatagatattggaagagagaatttgctttatctgttgtctagagctcatcagtaacagtattcagttagcagacagaagtgtagtatgctgtatgaatattttatattaaaatatgaaggtttgagagcaggccattggctactgactgtattttgttttccttttaccattttatcttatcttgctttggaggaccttaaatgctactgaaacttacctgagaaccataggactgtggcaaacaaaaccaattcatgaagtgaattaatgatgaggatctgaaaacttggctggggctatatatactggaagttgaaggttaaaggaaaagcacaagaaactttggaagcactttttctgcatacttagatgatcttcatgggcccacagggtaccaggataaagccgaactggtaccatctactcttttgaagtgttttagtctagttattggatcagtgaaaaacattagtatacgtttttaaataggctaatttttcaacttggatcattaggcttacgtactacttgtttcaaatgtgtcaaatacaaaaatggtaactaggttgacagatactttgtatttttcttttgaattcagacctggaatgtaagtaagtgacaatgcttatggaaagccagttagttagaattggaaatctgtcttgtcattttacaagcattagattcctttcctgtgtgaagaaagcctcagtgaaacaggtctttgccataactttatgaagtgctacagaaagcacaaagaattgattcatgttcatcaatacctgctgagagtactgtcccaggaatatccagtggatggattcatcatccaggaggttcaaaagtaagatggttttcaaatcatttttgagactggttgcataacagcagggtacctgaaagagccttctgggagttagtgaactaggtagattgttttgttcacataacgccaccatcaacttaaagtgaattgtctttgttataaatgaggtcactatggacttaccctaaagatcttctgtacttctgtcttccataggacaaatgataagtactacatacctcatctcttgggttattattgtagtcttgcattcatggttatgaatttaaaaataaataccaattatggaaatagtactaaaggcttgccgcacatgaaacattattttaattggtttaaagtccctttataaagagtgctacatggtttagataaaggaaacatataactattgagttacaggggattttattaattataaaatgcaatcaatttaaattacgtaggtttaagactagtcccttggataagccccaagcgaatttgtcttcagattattaaaattagtgctgtaaatcagggtgggcaattcacagcctttctgaactgactgaactagagcttgcagtgaagtgttctgctgagactgagcaccttacagatatttttctccagaagatggtgctgggtaataaaatcatcacaattagggaatggttagtggtctctactgtggcaaatgccaactgttggaattcactttattgtagaaaaacccaaactgagactcttaagttttgtttagcaatgtgtttctggtatgaaacaaactactgtgtcactgtccaggtaggaaacaattctttcaactgggttttcagcataaatgggaactgatgtagaaggcaggatttagcccttctaggcaaaagaaaagctcagttgggtttcacgagtgttcctgtgcttatattcagtctgtgcctacatgttctcatgcatgtctaacctgatttacctcttacctgtaacctaccttatcatgtggcttttaattgacagtcactcagccatttctaagcagatatagtagtacctttcagaactcacattggcaagtgtaaaaagatgacttaaggtgaagtgaggacaaaatcacattctgcatactaacctatttttttctccctttaaggtgctaaacttgcacctcatgtccactcagtaacaagtattgggacgtagagcacagcctcactcagctctgaaaggtaatacagcttgtgaggaagtgagccagcagtggcctttgcaattgtggatcttgagctctgctctcagcagatttcaggtgtaaccatttgttaactgtactgaaggtgtgtcctcaagaagaaagtgttcaaattaaaaaagctgctgccaagtacaaaaaaaaaaaaaaaaaaaa

SEQ ID NO: 171 - protein, 862 aa, Homo sapiens
MAQPGPASQPDVSLQQRVAELEKINAEFLRAQQQLEQEFNQKRAKFKELYLAKEEDLKRQNAVLQAAQDDLGHLRTQLWEAQAEMENIKAIATVSENTKQEAIDEVKRQWREEVASLQAVMKETVRDYEHQFHLRLEQERTQWAQYRESAEREIADLRRRLSEGQEEENLENEMKKAQEDAEKLRSVVMPMEKEIAALKDKLTEAEDKIKELEASKVKELNHYLEAEKSCRTDLEMYVAVLNTQKSVLQEDAEKLRKELHEVCHLLEQERQQHNQLKHTWQKANDQFLESQRLLMRDMQRMEIVLTSEQLRQVEELKKKDQEDDEQQRLNKRKDHKKADVEEEIKIPVVCALTQEESSAQLSNEEEHLDSTRGSVHSLDAGLLLPSGDPFSKSDNDMFKDGLRRAQSTDSLGTSGSLQSKALGYNYKAKSAGNLDESDFGPLVGADSVSENFDTASLGSLQMPSGFMLTKDQERAIKAMTPEQEETASLLSSVTQGMESAYVSPSGYRLVSETEWNLLQKEVHNAGNKLGRRCDMCSNYEKQLQGIQIQEAETRDQVKKLQLMLRQANDQLEKTMKDKQELEDFIKQSSEDSSHQISALVLRAQASEILLEELQQGLSQAKRDVQEQMAVLMQSREQVSEELVRLQKDNDSLQGKHSLHVSLQQAEDFILPDTTEALRELVLKYREDIINVRTAADHVEEKLKAEILFLKEQIQAEQCLKENLEETLQLEIENCKEEIASISSLKAELERIKVEKGQLESTLREKSQQLESLQEIKISLEEQLKKETAAKATVEQLMFEEKNKAQRLQTELDVSEQVQRDFVKLSQTLQVQLERIRQADSLERIRAILNDTKLTDINQLPET

SEQ ID NO: 172 - DNA, 101 bp, Homo sapiens
actgaaaacccaaacgtatttgctgaatggatagtatactggcctctgcatcagaagacctggggtccaggcccagtactgtcggaaacagttcttcatac

SEQ ID NO: 173 - DNA, 101 bp, Homo sapiens
cgtctctgcccgcggctgtggcggcgccggcggatccagccttagcggttcctctctgggcggcggcggcggcggctcggttgacgcctcctccgccagct

SEQ ID NO: 174 - DNA, 101 bp, Homo sapiens
tcatttgtttcttgaatccaggcactgcgggagttggtattaaaataccgcgaggacatcattaatgtgcggacagcagcagaccacgtagaagaaaagct

SEQ ID NO: 175 - DNA, 101 bp, Homo sapiens
tggtgtaattctccaggctctaggctcttttaggtagtgcactggggccctgagggagtttctgtgagtttcagctttttcctttttcacagttggagtcc

SEQ ID NO: 176 - DNA, 101 bp, Homo sapiens
tggcattaatcttcattcaaaacttgtattttttaggctaccgttgaacagctaatgtttgaagagaagaataaagctcagagattacagacagaattaga

SEQ ID NO: 177 - DNA, 101 bp, Homo sapiens
acttgtattttttaggctaccgttgaacaactaatgtttgaagagaagaacaaagctcagagattacagacagaattagatgtcagtgagcaagtccagag

SEQ ID NO: 178 - DNA, 101 bp, Homo sapiens
aaagctcagagattacagacagaattagatgtcagtgagcaagtccagagagattttgtaaagctttcacagacccttcaggtgaggcatttggggaacca

SEQ ID NO: 179 - DNA, 101 bp, Homo sapiens
tgcttacttctagagggagaagactgtgcggcacaggaaacagcaaacagcggggtgatctgcagcccagagaccttcaaatgcgaacactataaactcca

SEQ ID NO: 180 - DNA, 119 bp, Homo sapiens
tattaaaatatgaaggtttgagagcaggccattggctactgactgtatttcccttgctcagtacatttttgttttccttttaccattttatcttatcttgctttggaggaccttaaatg

SEQ ID NO: 181 - DNA, 105 bp, Homo sapiens
gtatttcccttgctcagtacatttttgttttccttttaccattttatcttatcttgctttggaggaccttaaatgctactgaaacttacctgagaaccataggac

SEQ ID NO: 182 - DNA, 101 bp, Homo sapiens
tttggaagcactttttctgcatacttagatgatcttcatgggcccacagggtaccaggataaagccgaactggtaccatctactcttttgaagtgttttag

SEQ ID NO: 183 - DNA, 101 bp, Homo sapiens
agtactacatacctcatctcttgggttattattgtagtcttgcattcatgattatgaatttaaaaataaataccaattatggaaatagtactaaaggcttg

SEQ ID NO: 184 - DNA, 101 bp, Homo sapiens
gaatttaaaaataaataccaattatggaaatagtactaaaggcttgccgcgcatgaaacattattttaattggtttaaagtccctttataaagagtgctac

SEQ ID NO: 185 - DNA, 105 bp, Homo sapiens
aataccaattatggaaatagtactaaaggcttgccgcacatgaaacattattttaattggtttaaagtccctttataaagagtgctacatggtttagataaagga

SEQ ID NO: 186 - DNA, 101 bp, Homo sapiens
ttagataaaggaaacatataactattgagttacaggggattttattaattttaaaatgcaatcaatttaaattacgtaggtttaagactagtcccttggat

SEQ ID NO: 187 - DNA, 101 bp, Homo sapiens
ttgagttacaggggattttattaattataaaatgcaatcaatttaaattatgtaggtttaagactagtcccttggataagccccaagcgaatttgtcttca

SEQ ID NO: 188 - DNA, 101 bp, Homo sapiens
cctgatttacctcttacctgtaacctaccttatcatgtggcttttaattggcagtcactcagccatttctaagcagatatagtagtacctttcagaactca

SEQ ID NO: 189 - DNA, 101 bp, Homo sapiens
ctcttacctgtaacctaccttatcatgtggcttttaattgacagtcactcagccatttctaagcagatatagtagtacctttcagaactcacattggcaag

SEQ ID NO: 190 - DNA, 101 bp, Homo sapiens
atgtggcttttaattgacagtcactcagccatttctaagcagatatagtactacctttcagaactcacattggcaagtgtaaaaagatgacttaaggtgaa

SEQ ID NO: 191 - DNA, 101 bp, Homo sapiens
gtattgggacgtagagcacagcctcactcagctctgaaaggtaatacagcctgtgaggaagtgagccagcagtggcctttgcaattgtggatcttgagctc

SEQ ID NO: 192 - DNA, 101 bp, Homo sapiens
acagcttgtgaggaagtgagccagcagtggcctttgcaattgtggatcttaagctctgctctcagcagatttcaggtgtaaccatttgttaactgtactga

SEQ ID NO: 193 - DNA, 51 bp, Homo sapiens
gtacttgagaagcaatgttttcagataagaacctcactgcatttaacccaa

SEQ ID NO: 194 - DNA, 51 bp, Homo sapiens
tagaacagagggaaaaatgaaacacggtagataacaacaaaggaaggataa

SEQ ID NO: 195 - DNA, 51 bp, Homo sapiens
aaaattcagtattatactttcccttgaaaatagagatgatacgatactggg

SEQ ID NO: 196 - DNA, 51 bp, Homo sapiens
acaaaataagtgattataagggacattggatttctaaaatgacattactgg

SEQ ID NO: 197 - DNA, 3225 bp, Homo sapiens
  exon (1201)..(2200)
  exon (2501)..(2724)
actggaatccgggaggtggaggttgcagtgagctgagatggtgccactgccctccagcctgggcaatagagtgagagactccgtctccaaaaattaaataaataataaaataaaataaaattacaaactactccaattaaccgctaaccttaatacagtctatccttctacttggacaaatctacctgtttaagacctggaagaccaggtttaaatttagaattcctgggctcctgggagttatgcccatgaatgaggtggcgaaagcagcacaggccctggcccaactattgtctcttggctcacttgccttcttttctcacctctgtcctgcaccatgagggatctgtggacataggagctcaaacacccaagtgtcgtgtcacccccttaaaataaaacaaagctgccctttagcctccctttttttcagtgagaaataatcattttaataaaagtataccttatttaaaacaaatgatttaaagaaagtagaaactgattctaattagtggattttctgattattattattattatttgagatggagtctcgatctgtcgcccaggctggcagtggtgcgatcttggctcactgcaacctccgccttctgggttcaagcaattctctgcctcagcctcccgagtagctgggagtacaggcgcctgccaccacacccgactaattttttgtatttttagtagagatggggtttcaccatcttggagaggctgatcttgaactcctgacctcgtgatccacctgcctcagtctcccaaagtgctgggattacaggcgtgagccactgtgcccggcctattattatttttttattatactttaaattcttggatacatgtgctaaacgtgcaggtttgttacataggtatacatgtgccatggtggtttgctgcatctatcaacccgtcatctaggttttaagccccgcatgcattaggtatttgtcctaatgctctccctccccttccccccaccccccacaggccccggtgtgtgatgttcccctccctgtgtccatgtgttctcattattcaattcccacttatgagtgagaacatgaggtgtttggttttcttttcctgtgttagtttgctgagaatgatggtttccagcttcatgcatgtccctgcaaaggacatgaactcattctttatgctttcactttagcttcttttagggatgtctagactctgccatagagagaatggatctgggaaagagaccacagcttcagccatctggaaagggaattctggggccacaagtattcagaacttggtcctgaagtgccaaaccctgtggactccctcatcctggggtgggattgctgggtcttaaaatgtacataattcctgatgctcctctctgatttcaaaatagctttttaggccgggcgcggtggctcacgcctgtaatcccagcactttgggaggctgaggcaggcggatcacgaggtcaagggtttgagaccagcctgaccaacatagtgaaaccccgtctctactaaaaatacaaaaattagccgggtgtggtggcgtgcgcctgttgtcccagctagtcgggaggctgaggcaggagaattgcttgaacccgggaggcagaggttgcagtgagccgagatcgcaccatggcactccagcctgggtgtcagagtgagactctatctccaaaaaaaaaaaaaaagctttttaaactacctccttggcatggggcactccaggtgtcgaaatcagacggggagtggtgattagaggggagttcctaaagtatagggcccaggggcccaagtataagggccacactttgtgtatatgatttctcctttcctgccatgagtgcagggtctgtacctggctgtatctccagcatctatcacgactgaaaacccaaacgtatttgctgaatggatagtatactggcctctgcaycagaagacctggggtccaggcccagtactgtcggaaacagttcttcatactttattacctcgtttaaacttttcttagccattatattgataaaaattccaagaggtgaagtgactctcccaaggtcgcaaagctagaagaggtagaggctggaactgcaccccgccatcggtcctcctctcttactcatttttttttttcccctcactgtgctggggtggagaaccgggaccggcaccttcgagaggccaggcctctgctgcagcccctcttctccagctccgctcggcactcagcctccccgcgccgctgggtcaggcgcccagctccgccgaaaccctcccctcccgccgcgctccctccgcgctccctccgcgctccctccgcgctccctccgcgctccctccgcgctccctccgcgctccctccgcgctccctccgcgctccctccgcgctcccgaggccccgcccctcccctcgggccaacgtcacgtgccgccccatccccctgcgcctgcgcactgcttatttcccgctgtcaggatgaggaggcggaggtcggcggtcgggtccgtctctgcccgcggctgtggcggcgccggcggatccagccttagcggttyctctctgggcggcggcggcggcggctcggttgacgcctcctccgccagctgagcccgcgggagcccaggacgccgcttccccgcccatccccgctccccgaggccggccgcctggtcatggcgcagccgggcccggcttcccagcctgacggtgaggcgcccaccatggcaggcgcggcgggcgcggcctgcccggcgtcggcgtcgcgggaggatttcggggcgggcaggcggcggcaagggcgcgcgcaggccccgggggtgaccccgccgggcggaggcgggggcgcgcgggctgcggcgcgcgagggcggcgcgggcgccccggctgccgtcgctggggagggggcgggaggcgcgggtgcagcgcttgcgggagggcagagggaagggcgtggggaggctgctgggtagcgtggggtagtgtggggagggagcggttctgggtagcgggggaccggcacgtgggttctgcccgtgggggaggatggaaatcgggaacatgtgctatattcgttaaagaaaaaaaatcttagcttaggtagtgtaccctccctgccgccccaatccttgctatagaactctttgcacccagttatgtgacctgaaagtagttgtgtacagtaactggatttagtagcattccctgaat

SEQ ID NO: 198 - DNA, 2118 bp, Homo sapiens
  exon (501)..(690)
  exon (1562)..(1671)
tacctctggcctaaggtagtactttgcctctggtagatgtttagtaaatgtttgaatgaatgaataagtgagtaagtaaataaatgttatcctcttagttcacacttgctactgagtgtgaacttgctactcagttttgtcttcatttcctaactcctcccaaatttctgcaagtaatagtagaggattctaaggtattatttctattgaatggcatattgtaagtcacttaatctttttatttttctgcttatgaaacagttttgagggaagagtatgtggcttacaagatacgacttggccagaaatgtcttttctataacatactgaatgttaacctgacatggcacctgccctgaagctctaagtggcttaatggtcaaagtcttaatttttgaaccattaaaacaacatctgagattctggttacagaaaatctttagcttctttatttcctttcactctcacaaacccaataatcatttgtttcttgaatccaggcactgcgggagttggtattaaaataccgygaggacatcattaatgtgcggacagcagcagaccacgtagaagaaaagctgaaggctgagatacttttcctaaaagagcagatccaagcagaacagtgtttaaaagaaaatcttgaagaaactctgcaactagaaatagaaaactgcaaggaggaaataggtgaagataaaagtgatgtagtttagaattagagtcactaaataaaactttagtaaaagaagcaatacatggccatggagtctggaacacagaaaagcttaggaaagaatttagtaaggactcagtccattttttgtagatattctgatatattcagattctgaatatatattctgatatagtcaaataatcagaaattctggttatttaaaaaatttttttttttttttttttttttgagacggagtttcattcttgttgcccaggctggagtgcaatggcgcgatcttggctcaccgcaacctctgcctcccaggttcaggcaattctgctgcctcagcctcccgagtagctgggattacaggcatgtgtgccagcacacccagctaattttgtatttttagtagagacgggtttctccatgttggtcaagctggtctcgaactcctgacctcaggtgatctgcctgcctcggccttgcaaatgctgggattacagttgtaagccaacgcgcctggccgaaaactcgtctttttaggagttctgtggcctctttggcaattattcatagataggattctcagtacttgaacccagaaccaggggaacgtgattcaatgggtggcatttccctgcagagatgtgatacatgatctagaggtagtttatgacacagtgtccatttgcatggatcctgcttttccctgagcctaaatatgctgattgcttggtggtaattttgagacagcccccggaacccatgttcagcatacatttgaatcctttggggggtgctctaaaattttaaagaaaaaaatgttcatgcacaataatagatgaatgctaatacatctcatttttttccttctagcttctatttctagcctaaaagctgaattagaaagaataaaagtggaaaaaggacaggtaagtcgtgagtttcaaattaattctatcagcaaccagtggttatttactgactcctactatgctgcacccaacgaataaaaaatagttaaggcatgggccctgccttaaggaacttttgtcttgtgggaagaaaaccacggggtaagggtgtgctggtgatttattgagagtgccctgtgtgtcaggctacgttaaactggaggaggtaaggctaagatgtgactgtggcctggagtttccagtgtagtgagaagataggcaaggcatggtcataacatgttatatgcttagaggtacagtagaaatatgtataaaaaacattacaaacaagagatgacattttctagctggcttagtcctcttagacatcattagttcctttcatagtaaccccattcaacttcctgacctcactgttccttgatttagagattttcacctccaccctgctctccccttccacacactgggctgcattttgcccaactgtgacatctc

SEQ ID NO: 199 - DNA, 2143 bp, Homo sapiens
  exon (501)..(599)
  exon (1525)..(1642)
cctgcctcacacctctctgcctcagtgcctgtggctcccaacgtgctgtgctgtaggccagccgaacatgccactgttgctgcatgtgtttttagtgcgtgccatccattccctcttattggagtatctctccatcttctccccttgtcacccttgtctttgccctgtaaaaatgtaggagtcaaatgtcatctcctctaggaagtcctttgtaacttttctggcagaattaaatgcttctttcttcatcctttacatgtctgtttaccctgatttctccattttgaggccttagaatatagtaggcacctaataatggttaatgaaagaatagttcaggaagaatacagaggggatccacagagctgaaagggtgagaggagtattcccagtgtagcccgagtgtcttggtgtaattctccaggctctaggctcttttaggtagtgcactggggcccwgagggagtttctgtgagtttcagctttttcctttttcacagttggagtccacattaagagagaagtctcaacagcttgagagtcttcaggaaataaagatcagtttggaagagcagttaaagaaagagactgctgctaaggtagtgttttcattagtcatttaattttaaaaagcagggctaagaatgcaggatcacatcttgcttgttgaaaaaaaaatattggtgctttgaagtgtcaccttttaaaaagttggcaaaactgacagcttgtgaaaagaaaaaacttaaacgaattgatctattccagctgggttaaatcttttctgccaggtctggaggcctgcgtcataggctagcttcagatagtaggcagtcagggccattgaccaagcctgggcactgcccagttagaagcactgctttgaaaatgtcattccatttgactgatgtatcaaatcctaagagagattgcatcaaaccaggtttgctgcctaaattttgatgagttccgttagaataaacgtgcatgttgtgggggtagtttcctagaaatggtcttagtgagctgagtggtcagacctgaaagtgcagacagtgttgctgaactgcttgtttttggaaaggctcccacacatcctgctggttttctgtaagagagactggggatagctggggcgtattcactaagtttcctggtggatgcttgactgtggaggttgtcagaggaagtcctgtatgtatccctgttggtgtgacagacaccgatcttagcagctgttttggtgattatcgtcactgtcaccagctgctgggggtgggggagggcagcactttaatccatttcttcctttggcttttcatacccagttcatctcaggacttagagcaagtagtctagatggcctgcacgcttgccctatagataaagagattggtcgtgtataggagtgcgacggatatccacccacctttctgccctagtagtaggtaactacaagttactggatttcctaagtaattcggccctttggcattaatcttcattcaaaacttgtattttttaggctaccgttgaacarctaatgtttgaagagaagaayaaagctcagagattacagacagaattagatgtcagtgagcaagtccagagrgattttgtaaagctttcacagacccttcaggtgaggcatttggggaaccacatacagagcacgaaggcagttttgggggacagaaccttgccgatccctgacttgaccactggcagtagctagaggtttagagactggctgctcctacctccaccccaaatgtctgactcatcattcaagccagaaacctggtgtgttcttcacacttggcccatttttctttttctgtatgccttgccaattttgcctccttatgagtaaagtactgactccttagcataccatgtaagactcttcccaaccaggcccacccctgtattttgctcatctctctgccttgttttacatgtttaactgcttgtggttcctcgcccacagcgtggtgttctgtctggtaagcatcctcatctcatcccctcctgactcctttctttcaaggctcagcgtaggtctgtcccctctgtggagctcttctaggtccctgagctgggctaaagtgcccctccctctgccatgctccctcgggcactc

SEQ ID NO: 200 - DNA, 3701 bp, Homo sapiens
  exon (501)..(3200)
tgtgcttataatcccagctacttgggaggctgagacaggagaattgcttgaacccgggaagtggaggttgcagtgagccaagatcatgccactgcactccagcctgggtgacggagcaatactccatctggaggaaaagaaaaagcaagcaagccaggtgtgatggcaggcacctgtaatctcagctactcgggaggctgagacaggagaatcacttgaacccgggaggtggagactacagtgagccgagatcacaccattgcactctggcctgggctggcctggatgatgagcaaaactctcccccccaaaaaaaaatcccagtccgttacacggtagctttggggaattatttttaaaatttttaattgttcttgctgtctccctttgaagtgactagtactctggtgagttaatctgctacatctcagctaaaccagtcaaagttcagaaaatctaggcaggagccacctgtagttatctcaccattgtttctccaggtgcagttagagcggatccggcaagctgactccttggagagaatccgggcaattctgaatgatactaaactgacagacattaaccagcttcctgagacatgacaccctcatggcaggattctagcctgcactttgggtttttaactcatctttagagcaacagtaattattatttaactcttaactgaagaaagagaagtcacaacaaaaggaagactggagaaatgcttacttctagagggagaagactgtgcggcacaggaaacagcaaacagyggggtgatctgcagcccagagaccttcaaatgcgaacactataaactccaggcttgattccaacaggcgtgggatcagatttggtgatggaaaaagcgctgtttccttgcctgctttctccaagacagattttcggaacacatttccctaccctaaagcgacatcccagtagtgtttggaattttctgttcatatagtgtttggaattttctgttcatagatattggaagagagaatttgctttatctgttgtctagagctcatcagtaacagtattcagttagcagacagaagtgtagtatgctgtatgaatattttatattaaaatatgaaggtttgagagcaggccattggctactgactgtattttgttttccttttaccattttatcttgctttggaggaccttaaatgctactgaaacttacctgagaaccataggactgtggcaaacaaaaccaattcatgaagtgaattaatgatgaggatctgaaaacttggctggggctatatatactggaagttgaaggttaaaggaaaagcacaagaaactttggaagcactttttctgcatacttagatgatcttcatgggcccacaggtaccaggataaagccgaactggtaccatctactcttttgaagtgttttagtctagttattggatcagtgaaaaacattagtatacgtttttaaataggctaatttttcaacttggatcattaggcttacgtactacttgtttcaaatgtgtcaaatacaaaaatggtaactaggttgacagatactttgtatttttcttttgaattcagacctggaatgtaagtaagtgacaatgcttatggaaagccagttagttagaattggaaatctgtcttgtcattttacaagcattagattcctttcctgtgtgaagaaagcctcagtgaaacaggtctttgccataactttatgaagtgctacagaaagcacaaagaattgattcatgttcatcaatacctgctgagagtactgtcccaggaatatccagtggatggattcatcatccaggaggttcaaaagtaagatggttttcaaatcatttttgagactggttgcataacagcagggtacctgaaagagccttctgggagttagtgaactaggtagattgttttgttcacataacgccaccatcaacttaaagtgaattgtctttgttataaatgaggtcactatggacttaccctaaagatcttctgtacttctctcttccataggacaaatgataagtactacatacctcatctcttgggttattattgtagtcttgcattcatgrttatgaatttaaaaataaataccaattatggaaatagtactaaaggcttgccgcrcatgaaacattaattggtttaaagtccctttataaagagtgctacatggtttagataaaggaaacatataactattgagttacaggggattttattaattwtaaaatgcaatcaatttaaattaygtaggtttaagactagtcccttggataagccccaagcgaatttgtcttcagattattaaaattagtgctgtaaatcagggtgggcaattcacagcctttctgaactgactgaactagagcttgcagtgaagtgttctgctgagactgagcaccttacagatatttttctccagaagatggtgctgggtaataaaatcatcacaattagggaatggttagtggtctctactgtggcaaatgccaactgttggaattcactttattgtagaaaaacccaaactgagactcttaagttttgtttagcaatgtgtttctggtatgaaacaaactactgtgtcactgtccaggtaggaaacaattctttcaactgggttttcagcataaatgggaactgatgtagaaggcaggatttagcccttctaggcaaaagaaaagctcagttgggtttcacgagtgttcctgtgcttatattcagtctgtgcctacatgttctcatgcatgtctaacctgatttacctcttacctgtaacctaccttatcatgtggcttttaattgrcagtcactcgccatttctaagcagatatagtastacctttcagaactcacattggcaagtgtaaaaagatgacttaaggtgaagtgaggacaaaatcacattctgcatactaacctatttttttctccctttaaggtgctaaacttgcacctcatgtccactcagtaacaagtattgggacgtagagcacagcctcactcagctctgaaaggtaatacagcytgtgaggaagtgagccagcagtggcctttgcaattgtggatcttragctctgctctcagcagatttcaggtgtaaccatttgttaactgtactgaaggtgtgtcctcaagaagaaagtgttcaaattaaaaaagctgctgccaagtacactgtgtggtcttctcctttgaatcctagggttctatccctcttcagagtcatgtttctggtgctgctactttaaaacacagctcacaagaataactaacttgctcaaatatggagaaaactcaatagggttcagggaggttctggcagtgtgcagtgtgaaataatcctgagtccttgctgaacacaactgtaggcttgagttataaagcacattccaaattttaaataaaagcatttactcaattattataaaacaacatatttaaaaagatgaaccacaccaaaggtcatcaaaacacctttttataaattagataattctacctgttttacaatatgggtttaagccttcaatggtgttcagttcaggtgtgagtcagctcctggtggtgtcagaagtttacatgattgcggatatcattgatttgcttcaccatttcccttatatgttcacccctgtaaaattgtaaagtcactcacttttggaattataata

SEQ ID NO: 201 - DNA, 106557 bp, Homo sapiens
cactggaatccgggaggtggaggttgcagtgagctgagatggtgccactgccctccagcctgggcaatagagtgagagactccgtctccaaaaattaaataaataataaaataaaataaaattacaaactactccaattaaccgctaaccttaatacagtctatccttctacttggacaaatctacctgtttaagacctggaagaccaggtttaaatttagaattcctgggctcctgggagttatgcccatgaatgaggtggcgaaagcagcacaggccctggcccaactattgtctcttggctcacttgccttcttttctcacctctgtcctgcaccatgagggatctgtggacataggagctcaaacacccaagtgtcgtgtcacccccttaaaataaaacaaagctgccctttagcctccctttttttcagtgagaaataatcattttaataaaagtataccttatttaaaacaaatgatttaaagaaagtagaaactgattctaattagtggattttctgattattattattattatttgagatggagtctcgatctgtcgcccaggctggcagtggtgcgatcttggctcactgcaacctccgccttctgggttcaagcaattctctgcctcagcctcccgagtagctgggagtacaggcgcctgccaccacacccgactaattttttgtatttttagtagagatggggtttcaccatcttggagaggctgatcttgaactcctgacctcgtgatccacctgcctcagtctcccaaagtgctgggattacaggcgtgagccactgtgcccggcctattattatttttttattatactttaaattcttggatacatgtgctaaacgtgcaggtttgttacataggtatacatgtgccatggtggtttgctgcatctatcaacccgtcatctaggttttaagccccgcatgcattaggtatttgtcctaatgctctccctccccttccccccaccccccacaggccccggtgtgtgatgttcccctccctgtgtccatgtgttctcattattcaattcccacttatgagtgagaacatgaggtgtttggttttcttttcctgtgttagtttgctgagaatgatggtttccagcttcatgcatgtccctgcaaaggacatgaactcattctttatgctttcactttagcttcttttagggatgtctagactctgccatagagagaatggatctgggaaagagaccacagcttcagccatctggaaagggaattctggggccacaagtattcagaacttggtcctgaagtgccaaaccctgtggactccctcatcctggggtgggattgctgggtcttaaaatgtacataattcctgatgctcctctctgatttcaaaatagctttttaggccgggcgcggtggctcacgcctgtaatcccagcactttgggaggctgaggcaggcggatcacgaggtcaagggtttgagaccagcctgaccaacatagtgaaaccccgtctctactaaaaatacaaaaattagccgggtgtggtggcgtgcgcctgttgtcccagctagtcgggaggctgaggcaggagaattgcttgaacccgggaggcagaggttgcagtgagccgagatcgcaccatggcactccagcctgggtgtcagagtgagactctatctccaaaaaaaaaaaaaaagctttttaaactacctccttggcatggggcactccaggtgtcgaaatcagacggggagtggtgattagaggggagttcctaaagtatagggcccaggggcccaagtataagggccacactttgtgtatatgatttctcctttcctgccatgagtgcagggtctgtacctggctgtatctccagcatctatcacgactgaaaacccaaacgtatttgctgaatggatagtatactggcctctgcaccagaagacctggggtccaggcccagtactgtcggaaacagttcttcatactttattacctcgtttaaacttttcttagccattatattgataaaaattccaagaggtgaagtgactctcccaaggtcgcaaagctagaagaggtagaggctggaactgcaccccgccatcggtcctcctctcttactcatttttttttttcccctcactgtgctggggtggagaaccgggaccggcaccttcgagaggccaggcctctgctgcagcccctcttctccagctccgctcggcactcagcctccccgcgccgctgggtcaggcgcccagctccgccgaaaccctcccctcccgccgcgctccctccgcgctccctccgcgctccctccgcgctccctccgcgctccctccgcgctccctccgcgctccctccgcgctccctccgcgctccctccgcgctcccgaggccccgcccctcccctcgggccaacgtcacgtgccgccccatccccctgcgcctgcgcactgcttatttcccgctgtcaggatgaggaggcggaggtcggcggtcgggtccgtctctgcccgcggctgtggcggcgccggcggatccagccttagcggtttctctctgggcggcggcggcggcggctcggttgacgcctcctccgccagctgagcccgcgggagcccaggacgccgcttccccgcccatccccgctccccgaggccggccgcctggtcatggcgcagccgggcccggcttcccagcctgacggtgaggcgcccaccatggcaggcgcggcgggcgcggcctgcccggcgtcggcgtcgcgggaggatttcggggcgggcaggcggcggcaagggcgcgcgcaggccccgggggtgaccccgccgggcggaggcgggggcgcgcgggctgcggcgcgcgagggcggcgcgggcgccccggctgccgtcgctggggagggggcgggaggcgcgggtgcagcgcttgcgggagggcagagggaagggcgtggggaggctgctgggtagcgtggggtagtgtggggagggagcggttctgggtagcgggggaccggcacgtgggttctgcccgtgggggaggatggaaatcgggaacatgtgctatattcgttaaagaaaaaaaatcttagcttaggtagtgtaccctccctgccgccccaatccttgctatagaactctttgcacccagttatgtgacctgaaagtagttgtgtacagtaactggatttagtagcattccctgaatggcagtgtggcttaatggttaagtgttggggcctgggagtctagaggacctgtattcttaaccagcaagctctgggctcatttcttagcctcgttgagcctcagtattctcacccacgaattaaccaagaggttaattcatgcctttatattttatctataaaaatagcaacacgaatgtgtatatacaataatagtattatggaggtattaggaataatgagaatagtgtttgagaatgctgaggcctacttgcactacttgaagatatttgcttgtggaactaaaaaaaaaaaagtgaagtcgaagaaatgtgtcatttatattcttggaaggaaaaaagggccccatcctaaataatcaaagttggttgtcagagcccttcgtgaccttctgggaaattggactaagctgtgcttcacagattgactacatggttccaggttttaccacctagaatagatgtttggaaatagtgtgcttgggcttttccaaggtcccactgtatctagttgtgaaagtactttctggtgtatttctataatcagcgtgtgtgcttagcatctttaagtgtgagtagagtagaatgttgggaaaaggggcttggtacggagtaggtactttaaaacttggctttccttggggttgtctcaaaataacctttcgtgaaacccttactttttatttttgcctttggggaacttgaaaccatgttatcagattttaaggttctggctgctctctgggaaatgtgcttcagagcctgttagcctgtagttttgggtgttgttgcttgcctaaggggagatgtccagtaagcatttagacttttataagaacctgctttgctgtttctgttccaggagaagggaagggaagcatttttggtgggctgtcagagagaggaaactgggatgtcttcaggctgcattttaatgatcaccttttgcatttggtgtcaggcaagaaaactttgttcttccacaatcccactttgttactgcacacagaggcaagatacagagagcttgtggttctgaacaggagtggtaggtatgcatagctggctgctgccttctcttgagttgcatggaaagaaacgtctagggcagctcaggtgacatgaccgtctggaatcaaaattccctgcctctttgaagatatgaaatggtcttccttgtaaataggcagaagtgactaagcacttgaacgaggctagggaaaactagctttaggaaatcttgtattcttggtattttagttcaggtttctttcctatttctcaaatcttgtgactctaggatgagatttagtttgcatagattgcaatttttattttaaattaatgtaggtagccatggctactttttacagtaggagagagataatttggtacgtttgagtgccttgtgtcagtgccttagaagttcatcttggggattttaatttttttttttttctttgagacagtatctcactctgttgcccaggctggagagcagtggcgcgatcttggctcactgcagcctcgacctcctggggtcaaagcaatcctgctacctcagcctcccaagtagctgtgactacaggtgcatgccactattcccagctaatttttgtatttttgtagatacggcgttttgccatgttgcctaggctggtcccaaactcctgaactcaagggatccacctgcctacacttcccaaagtgctaggattgtaggtgtgagcccgtgagtccggcttttggggatttaatttgtgtctttagctgaactcatgtagaccattttagctttaggcacgtttgaatttcctagtcctgctgattaaaaaaaaaaaaaatcgccagaattcttttgtgtcaaactggtggtgaaagataactaactgcttagtctttgactttatcttgttttatcctgtttcagaagcgattgtctttgatgactttttaaaaaaaaaaaaatattgtctgtttttcatggccatatggtagattaggaaaatcgatttgtgtgtaaatcgaagggatgaaatgtaatcattttattcattgtaattattttgtaagttaaaaaaagttttgggtttttgatactgcatcttagtttacttatttggaatacaggtaattttaatagttaaagaaatttcagttgatctgttttcccttgagaatttaaaaatgaaaattttctaattttagtatttcttttaatctaagttcaactatatctttgaagcatttgctctggttttacttcactttttttcttttttttttttttcttttgtagagagggtctcattgtgttgcccagtctggtcttgaacccctgggctcaagtgattctcccatcttggcctctcagtgttgggattacaggcatgagcaactgcacccagcctacttcattattttttattcttgccatgttggccaggctggattcctgattgtttcctgttagttacacagacatgctaccttttacccctgaaggacatgctttacatacataagtctgcaacttccctatctcacttaataaatgttagctatcatattatatactcatggttatatggccatgtaatgttctgcaaacactataggcattatcttaggaaatcttcatagcaatggtactattgaatattactgcttctattttcttgatgaggaaactgaagcacacagaagttaaagaaacgtgcctgtgttatacagctattaagtgggggagcaggattcaaatccatgccatctggcttatgtactagatcatggactacttccaggtcagtgttgtaggccttcttcattcttcttaaagacgatcttatcatatgcatgtaccaggcatgatttatggcctatttccctattgtggggcaagtagattgttttcaaattttaattattttataagcagtgttgtaatggatgtccttgtgcatattttttaaggtactcttttacttctgtaagactagtgaattaaataaagggcatgagttccgagtggtttaaattttaatacctgttgctagcttactctccaaggcatcaatttacatacttgccaacgatatatggcaggtggatttcccctgtaatcctacaagctctggatgatgtcatttgttttaaatttgtgtcttttgattaaaaaaagtgatattgtttggccgggcatggtggctcatgcctgtaatcccagcactttgggaggccaaggcagatggatcacaaggtcaggcgttcaagaccagcctggccaatatggtgaaaccccatctctactaaaaatacaaaagttagccgggtgtggtggtgcgcacctgtagtcccagctactcaggaggctgaggcagaagaaccgcttgaacccgggaggtggagtgagcagtgagccgagatcgtgccactgcactccagcctgggggacagagtgagactctgtctcaaaaaaaaaagagttgtattgttcaattaacaagtatttgtgtgcctattctatgccgaatcctatgctaggatctaggaaatacagtgatgaacaaaaccagacccagtccctttcccaggtagtgaatcattcagccattaattagataatcctatagacacacacaaaactatttattcatctaatatgaatgcatactgtttgtcaggcacaattctaggcatttggaatacatcagtaggcaatatagataataaataaccctgccctagtgtgggagaaacggatattaaacaacaaacgtaagcaaatgatacgggttgttagatgataagtgcaatggaaaaaagaaaacagagcaggagaaagggaagggggtggggctggttttaaataggctggtcaggcagctttattgagaagatgacatttgtgcaaagacttgaagtagatagaggagttagccttgaggatatctggtggaagggtgttctaggcagggatcagtttttgcatatgccttgagggcggaagcatgtctggcatgtttgagtaatggcatggaggtcagtctggctggaatgatgttacggggcctggggcaagagtgtagtaggatatgaggtcagagaggtaacgaggtggaggcagatcttcttgggccctagaagtattgcaaagattggttttcactatggggaaccattgaaaagctttgaacagaggaatgatgtgatctcacttatgttttaaaaaaatcactctgggccaaagtgctgggattacaggcgaggtggctcatgcctagaattgtgcctgacaaacagtatacaggctcacgcctgtaatcccagcactttgggagtctgaggcaggtggatcacctgaggtcaggagttccagaccagcctggccaacatggtgaaacccaatctctactaaaaatacaaaaattagtcagacatggtggcacgcgcctgtaatcccagctacttgggaggctgaggcaggagaattgcttgaacctgggaggtggaggttgcagtgggcgaagatcatgccaccgtgctccagcctgggcaacagagtgagactctgtcgcaaaaaaaaaaaaaaaaaaaaaaaaacccaaaacactgagcgggcgtggtgttgtctcatacctgtaatctcaacactttgggaggcctaggtgggtggattgcttgagcccaggagtttgagaccagcctgggcaatatggcaaaaccgcatctctacaaaaaattagccgggtgtgatggcctgtgcctctagtcccagctactcaggaggctgaggtgggaggatcacctaagcctgggaggtcgaggctgcagtgagctgtgatcttgctacttcactcccacctaggtgacagagtaagaccctgtctcaaaaaaaaaatcactctgactgctggattggcagtggagtaatagggaggtatgaatccagaaaaaagatgttgaagcttggaccaggatggaggttatattttgaaagtatggccaacaggatttgctgacggattgaatatgggatgcaaaagaaactgagtagtcaaggattactcaaaggtgtttggcctgagcaactagatgaacacaatgctatgaatgcctataactgacttatttgaccaatatacagaggtcagtaaaggcttttgatgaagtagtcctggagccgagatctgatggatgagcaggactcctggttttggaggatgcagaacgagtaacataactgaagaaaggtcactgtgcctgggtagaggagtaggtatgggctggcctgaggggtctttttccttagaggtgtacgggaacccactgaagggttttaagcaggtagatgatgtgtggctttttattttattttatttatttattttttgagatggaatctcgctcagtcgcccaggctagagtgcagtggcactatctcggctcactggaacctctacctcccaggttcaagtgattctcctgcctcagcctcccaagtagctgggattacaggcatgtgctgccatgctcggctaattttatatttttagtagagatgaggtttcgccatgttcgtcaggctggcctctaactcctgacctcagatgatgcatccgccttggcctcccaaagtgctgggattacaggcgtgagccactgcgcctggcctattttatttcttttctttatttttttgagaccaagtcttgctgtgttgcccaggctggagtgcagtggtgtgatctctgctcactgtaacctctgcctcccaggttcaggcgattctcgtgcctcagcccctcaagtagctgggattacaggcgtgcaccactacacctggctcatttttttgtatatttagtagagacagggtttcaccatgttggccgggctggtcttgatctcctgttctcaatttatccaccctccttggcctcccaaagtgctgggattataggagtgagccactgtgcctggttgaagtgtggctttttaatttgcacttccaggataggaattatattaattatggcctctttgtttattggctggctggcttgcttccttcctttcatccatttttttctttctttcatttttttctttttttgcttgccctcccttcctccctccctttcttcttcttcttcctcttccttttctcttctactatgagttgctgtttcacatctttcttttgtggcttgtctgtttatatctgtttcccatttttccattgggttgtccttttctcagtaatttggaggagctctttgtaaattatattagccctttggtatgtgttgcaaattttggtctcacagtttgtcatttacctcgttttaaaaattttttgttatgcagaaagctttaatttttatgtagatctgaccttttttttttttttttaaatttatggtttctgggtttcttattttgctgaggaagacctccccaactctcatgtttatttaaagagaaaaaaccttatcattttcaacacttgtggttttttatattttgtagtccaatccatttgcaatttatttatttttaaattagagaagtttaatataaagaattattaactaaactggagatcacccactaagacaaaagaaaaccctaaagaatacaagactagtagacataaggaacagtctcgcttccagggctgaggcagagcaccctttatttttttttctgaatagatagatagttgtcttaacgtttattcaatagttcatgtttttgtttgtaaattataacttggtaaatctcccaacctttgaactagcagagatacttaatctgaaaaacaaaagccctgcacttatccactgtctttgtcactctgatatcccaacacacagtagcctggaattaggtaatggcctttaattttcatgtcttacctggctttctgtggagagaattgcttttgaatcttaagggctctaatttctaaaatatctccatttatcatatgctaggtttttatccactgaagtttgatgttctcttcttatgtagtcattaatttgaatattgtctttatagaagtatttatttattttttgagatggagtctcgctctgtcgcccaggctagagtgcagtggcacgatctcagctcactgcaagctccgcctcctgggttcacgccattctcctgcctcagcctcccaagtagttgggactacaggcgcccgccaccacacccggctaatttttttgtatttttagtagagacggggtttcaccgtgttagccaggatggtctcgctctcctgacctcgtgatccactcgccttggcctcccaaaatgctgggattacaggcgtgagccaccgcgcccgtcctccttgattattcttaagtatttattcattcagaaaaaatttggaatgagtacgttaagtgcacccactgtgcttccctctcttgtttaaaaaaaggacttaaaaaatatctgttgcgtttataagcttaagagagcatatatcattaacatctttacaattaagataaattaatgcattaagtgcatgttaatttaaataataatatttattattattttttgagatagagtctttctctgttgcccatgctaaaatgcagtgccgctatcttagctgactgcaaccttggcctcccgggttcaagtgatcctttcatctcagcctttggagtagctggaattactccgtgctcatgacccagcctgactaatttttttctagttttagtagagagtgggtttcaacatgttgcccaggctggtgctgaactcctggcctcaaatgatctgcccacctcggcctacaaagtgctgggattacaggtgtgtgccaccagacttggatgcattaattatattttttaatccttctgattctttaaaggtagtattaacactttcacaattgaggctatacaaattagtaacttgcctagaatccaggttgccgtgactattttcattctagctatccctcaggccagttttagcttagtaaactttgatcatttttaaaaaggcaaaattaaggctccaattttctgatcataaagtacaaagtgtaaaagaaaactagacttgctgagcgtggtggctcacacctgtaatcctagcactttgggaggctgaagtgggtggaccacgcggtcaggactttgagaccagcctggccaacagagtgaaaccccgtctctactaaaaatacaaaaaattaactgggcgtggtggtgggcacgtgtaaccccagctacttgggaggctgaggcaggagaattgcttgagcctgggaggctaagaggttgtagtgagccaagatcgtgccattgcactccagcccgggcgacagtgcgagactccgtttaaaaaaaagaaaactagacttacacataattctgtcctttatttttttattctacattttaaattaatttttatatctacaaataaaaatattttaaaacaattgatcatattgcacatgtggttttgcattctgccattttcatttggttatgatgtgaacagtttccctgtgttgtaagtttttttgttttgttttgttttattagtggttttggccagttgcggtggctcacgcctgtaatctcagctctttgggagtctgaggtaggtggatcacttgggtcaggagtttgaggccagcctggccaacatggcgaaattccgtttctactaaaaatacaaaaattaggcctgatggtgtgcgcctgtaatcccagctactccagaggctgagacaggagagagtcatctgaacctgggaggtggagtttgcagtgatctgagattgagccactgcactccagcctgggggaaagagcgatactctgtctcaaaagtggtgataagtctgattcatcatataaatgtatcattttcctattactgccagtttgatcatttgtaaattctcgctattaataattacataggaaacaacattctcgtacattaatctttgatctcatctttatttcctagagtgttctggatctgaagtatgacattttggtatatattgccaaattgctttctagaaagccagttctagtttacatttcttcttcttagtgctgacgatgtctgttagtctcacttcatccttgtcaacgtgaagtatagacttaaagtgttcttgccaataggcaaggcctaaaaatggtatctgactgattttagttgcagttttagtatgattggcttttgttcatttttttcctttttttgtttttgattttttaaaaaatatatatattggccatttttttgtgtgcattgcctcatgatgtcctttacccctttcttattaaatttttagtttatttactttttttttgagatggagtttcgcttcgttaccaggctgtagtgcagtggcgcgatcttggctcactgctacctccacctcctgggttcaagcagttctgcctcggcctcccgagtagctgggattacaggtgtgtgccactgtgtctggctaactttgtatttttagtagagatagggtttcaccatgttgatcaggctggtctggaactcctgacctcatgtgatccacccaccttggcctcccaaagtgctgggattacaggtgtgaaccactgcacctggcctttatttatttgcttttgagacagggtcttgctctgtggctggagtctggtggcatggtgcgatcttgcccgattgcaatctctgctttccgggctcaggtgatcctctcacctcagcctctggagtagctgagactacaggcatgcaccaccatgcctcgctagtttttgtatttttagtagagataaggtttttccatgttgcccaggctggtcttgaacttctgggctcaagccatctgcctgccttggcatctcaaagtgctggcattacaggcatgagctgctgtgccttgttcattttcttattaatttataaatattggccaggtgtggtggctcatgcctataatctcagcagtttggaagactgaggcaggtggatcccttgaggtcaggagttcgagaccagcctgactaacatgaaaccccgtctctactaaacatacaaaaattagctgggtgtggtggtgcgtgcctgtaatcccagctacttgggagggtgaggcacgagaatcgcttgaatctgggaggtagaggttgcagtgagccgagattgcaccattgcactccagcctggacaataagagggaaactctgtctcccccctcaaaaaaaaaaatctgtatatctttctctctatatatatctctttgtatataatatcttcatagacattggcctttgttttttatttgttacagatatttacaggtattttccatgttttttcttattttggcttttggggtaatttatttttttgagacagggtctctctccatcacccaggctggagtgcagtggtgtgatcacggctcaatgtaaccttgacctctcacctcagcctcctgagggccctataggcacatgccaccatgcctaggtaatttttgtattttttgtacagacagaatctccctttgttgccctggctggtctcaaactcctgggctcaagggatccacctgcctcagtttcccaaagttctttgattacaggtgtgagccactgcatctggccattgggataatttttgttataaagaaatctaaaatttcacttggacaaacttattggtaatattttgacattttcaaagatgttctctgtcgcaaaatcaattagatagctgctcataacttatgttgttagtgtttaaatttatttttaaacagtggccaatttttttctacatcatttcaattattaagttgtttctatgtgagctgtttgtcaagttggatcttccacatcttgcacttgtcattaattttctttctataattattttataattacagataaaatttatattgcccattgcagacaactaagaaaatgcaaaaaaagtgtaaagtgaacagtcagcaaagacagtttattaacactttggtatacagttagccctctgtatctgcggggtccactttcatgaattcaaccatctggggattgaaaataaaccctttgggaggctgaggcgggggaatcatgaggtcaggagttcgagaccagtctgacaaaccctgtctactaaaaatacaaaagtcagctgggcgtggtgacacgcgtttgtaatcccagctactcaggaggctgaggcaggagaactgcttgaacccgggaggcggaggttgcagtgagctgaggtggcgccactgcactccagcctgggtgacagtgagactccaactcaagaaaataaaccaataaaacaataagaatacaaattaaaaaatgcagtatgacaactatttacatagtatttacattgtattaggtattataagttatttagaggtgatttaaagtacatgggagaatatgcataagttatatgcaaatactacactgttttatataagggacttgaatatcatcagattttggtatctgagaggtcctggaaccaatttccctcagatactgagggaaaacggtattgtcttttttttttttttttttttttttttttttttgagatggagtctcgctctgtcacccaggctggagtgcagtggcgcgatctcggctcactgcaagctctgcctccgggtttgcgccattctcttgcctcagcctcccgagtagctgggactacaggcgcctgccaccacgccaggctaatttttgtatttttagtagagacagggtttcatcacgttagccagggtggtctcgatctcctgaccttgtgatctgccggcctcggcctcccaaagtgctgggattacaggcgtgagccaccgtgcccggccaacggtattgtctttttagagtttcatatgtataaaatatgtttaaaaaaaaacgtaaaaatttgatagaaaattacagtacttttatagcatgttttttcccacttaaatgaagagatgttcatgatgtattattaaataatgttatttttgaggacagatgcggtggcttacacctgtaatcccagcactttgggagaccgagtcgggcaaatcacctgaagtcaggggttcgagaccagcctgaccaacatggtgaaaccccgtctctactaaaaaaaaataacaaaaattagccaggcgtggtggtgcacacctgtaatcccagctatttgagagaggcttaggcaggacaatcccttgaacccaggaggtggaggttgccatgagctgagatcatgccactgcactccagcctgggcaacagaggaagattccgtctcaaaaaaaaaaaaaaagttatttttaatggtatgtaacaatagtattctaatgtatggattccataataggtttaattaaccctcttagtaagtattgtttttatttttttctatttcaaaggacactgcggcaaacatcctgatacatgtgtctctaaatatttagccaaatacttccctctgctaaatccctgttctgtcaaagtttacatacatttaaaatttgatacttttgatacatttaagtttttatatgttcttttgtgtcattaggaataactgtctgagaccaactggaaagccaacccctagtagcttcaaaagtgaagggttcagtttttctgtgtgttacacgttcacaagtagagcattctaaatttggttcagctgctcaaggatgtcaaagatctgagtttcttcagttttctgctttcttcctctgtgggcctgtttgccacatcattattttttgtagatttagttctgatttctttttgggactatttattcctttaaatcttctactgttttcttagttacatttgttgggttctctacttcaggcacatggatcatccttatattggatagtctgtttctcatagctgtttcctctctaattcctttacttttctttaaaattcactgagattatctcaggtctttttgatgtgtttaacaaaacggattgcattaatggatttctggatgtttgtttttgcgcacttcagatgaactcaacttggttgtgatggattgttattgtagtatgtagctagatctgatttgctaaggttcgagaatttttgcgattatattcataagtgagattggcttgtagttttccattttggtactgcattgggttttggtatcttttttttgtttgtttaaggcagagtttcattcttgttgcccaggctggagtgcaatggtgctatctcagctcaccacaacctccgcctccaaagttcaagtgattctcctgcctcagcctcccaagtagctgggattacaagcatgtgccaccacacccggctaattttgtatttttagtagactgggtttctacatgttgatgaggccggtctcaaactcccaacctcaggtaatccacccgccttggcctcccaaagtgctgggattacaggtgtgagccaccgtgcccagcctggttttggtatcttgattatactagcttggtaaaacgggaaacatttcatttttttctatgttgaggacagtttaagtagtatagaaaatattctctgaacatttgatagaatttatgttctctttcaagattcatcttaacttgtatagctattgcataatttattttgtcaattttattttctttttgtttttggttggggtgggcaaggtctcactctgtagctccagctggagtgcagtggtacagtcatggctcacggtagccttgaccccgtggggtcagttgatcctcaaccttctgagcagctgggactacaggtgtgcaccaccacatctggctaattttttattttttgtagagaagaggtttcaccatgttgctcagactggtctcgaactcttggctcaaatgatctgcctgcctcagcttccatgagtgctgggattacaggcgtgagccactgtgcccagctttttgttagttttctattgttagatattgactttttccgaatgttttggaattttaactgatactgcagtcaatattcttgcaattatgtctttatacatatctatgattatttccttaggataaattcttggtggtgaaattgtataatgacctttagttgagaaccactggtttatgacaaaatgctttaggataccccctttaccattctgatataaaattgtacacaagacttttttaaaaaccccaaaacctaacagcataatgcctttattgtaaaggaaaataatttgtaattaatacagattgcttacagatttcaacgtataaatgaacagtgtgactgcataaaagaagaacatccctaggaggtggtattacaccgtttacaacttctgctcatgtgactcatgaatctcctctattaaacacctgtaatcatggggaaatccagctaggccttggaaccaggcaggtcagtgtttgaatccagctctgctacttactagctgtatatcaataggttagcttaatcttagaatgtttctgcatctgtaactggggtgataatgcctattttatggtttggtttgaaaatttaatgagccagtgtataaaataacttgcctgatactccatgaagagctatttgtgaattatttaatccttactacaaagctagaagatagtcctattattagtcccccttgttacagatggagagaaggaaccagcttagtgggagggctgggattcaaaccctagtttaattccagagcctgtgctctcagctgttatgctctatggcttctcatataatagttgataaataggcaatggatacttgattgttagctcaattacacatttcattttctgtagctttaatcaagagtttcctcccaagtgttaacatcagcgttctttccttaagacttctctttcctcttggttcttgtgttcccttcctgagacatacagttaatctccttcatccacatgtaggcagatagctatttattaaaaattctgttccctctctgtgtatgaccttgctatttcggaaaagcccataaataatgcagccaactttccttgtaaataaaatataaccctgtgtttttattatttatttagaagaacttttcttctgataagtaacccccactgtagagtttatagctaatgtgtagcctttttataacccaagtgtagggagataaggaattacatctacattttaaaattttctatgttacaatcaagggaagagtatatatagggaatttgattcgttttacggtataattaaatatggttctaagaggtgttttttgttgcattaggcttttttcttgtaaatgatagaaatcttaagactattctaaaccaattactgtttatattagaggaactggtaataaccagagattatgatattctttatgaatagttctccactctgaattgtgtgtgtatgtgcataatgcctcgttatatcttcatatggagcttcttaaacacttaaaaatattagtatgtagagtcaccaccttccatgtgtcatgattcttaatgtatggccagtctcacgtataactcccacctcctccaggatttttttttttttttttgagacggagtctcgctctgtcgcccaggctggagtgcagtagcgagatctcagctcactgtaacctccgcctcccgggttcatgcctttctcctgcctcagccttctgagtagctgggactacaggcgtccgccaccacgcccggctaattttttgtatttttagtagagatggggtttcaccgtgttagccaggatggtctcgatctcctgacctcgtgatccgcccgcctcagcctctcaaagtgctgggattacaggcgtgagccactgtgcccggcctcctccaggattttaaactaggaatctgtgattttatttggaaatatttcagtgtatgtgtaaacgtaccacaatgctattataacacctaaaaccagttaacagtaacaccaaatatccattctgtgttcacatattccccagttgtcgtgcgcacttgtgtgtgtgtggagggggtgtggtgggaggaagtttcagcctaccacactgatacccaaactgtctcatttttggccagtgtgtggcctctttacattgactcctaaatctttttatataaccttaacagacaagatgttccaggcttatcttgtacacttcctgccctggacctggaattggtcctttttcctaaggatccctagttccttttagtggggaatgtcatttagagaacacagtctgggtactaggtgtgtagcaggttttttttttttttttaagcagttttacttaaatcactattatcactattatccttaaacagagaacactgggcatcatttaatcttttattgaggacttagtattatggaagttagttttggtactgagcggtaagctaatgagtccctagggccactgaagtgtgttttcagttagttttgtttgcccttatattacgtggttctgaattcatttttagtcacggttttatttttgccttgtgacccagtcctctctgctgtcattggggtttgtttctcatttacagggctattcaagctgctctctgcactcatttctttttctttttttcttttctttttctttttcttttttttttttttttggaggcagagtctctccttgtcgccaggctggagtgcaatggcgtgatctcggctcactgcaacctctgcctcctgggttcaagcgattctcctgcctcagcctcctgagtagctgggactacaggctcctgccaccatgcccggctaatttttgtatttttagtagagatggggtttcaccatgtgtgccaggatgctcttgatctcttgacctcatgatctgcccacctcggcctcccaaagtgctgtgattacaggcatcagccaccgtgcctggcctacactcatttctaaactgctttttctctctgattggactccaggcaaaactgagggttatattaggagatatgactgggtcttatagagtataatatgcagttagatgggaaggaaaatctacccagctaagcattcaagtgcatgagtttttcatttctgttaagcttgaaggctgttacattacattttgttgccaggcctccttaggcttctctagactgtgaaagtttctgtgactttggtttgatgatcttgccagttttaagaagtactggtcaggtattttgcagaatgtccctaaattgggatctgtgtgatgtttttctcatgattagactgacatagcgtcttgggaggaagagcacatgggtaaagtatcgttttctttgtgtcacatcaaggttacatacatggcttatcagtgatgtgtagccttgaccacccctactgaggtagtattggtcaagtttctctctctttcttggggtgcaagcggggggacctttctatactgtactcttgagaaggaagtcagtatgtgctcccccatccccgtatgatgttatgaaatcagccaggttgatcgtaagcagatttttcaagtgtttcctaccctctaactcttgttaattccttgtagatgtttgttattattgtttaatcattgcttagcaccctatgagcagtctttaagagtatggtagtgggagtgacagtatgttttgcccaagcttcttggttgcaaacaaaacaatttgtcctgtctggtctaagcagaaaaggtatttttgagaagatatgaagttgcttacagagtcattgggagggcaagggagagagattctagatgattctcaaactttagcctgcatctaaaagggcttgttaagcatgttaccgggccccatctccagaatttctgattccgggaagcctgggatggggcctgagaacttctcacaagtttccaggtgatggtgatgttgtggtcccagagctacacttggagaatcactcctttatgctaaactttaaggaatacccaaaagctgctctagaactgaccttacaggaaacttgcctctggtgctgctggcctatagaaattcactttaatgctgttgtctctgctgcttggactgataccatttctgattcaggagctagacctataccactgggacacgactaaaagtcttacagcaatgagaatggaacctcgtttctttacactgctctattctgaattgaagttgcatttgagtgtgtttgattggaggaggctgggtcacatgcctgcattctggttttaagggagattggggatttgtatttgacttctattttgggaagctgaaactcataaaatggaaatttctttaaatgtaagaagactatgcaaaggattgatagacagccatggatatggcagttgtcaactatagcagtactactgaaagtaacctgtccacaaactgtttttaatggtcttctagggcacaaggaacctgaaccagaatataaatccatgtactgctttcttcattgaaaaatgtcagtagaactaagcaatgtgcttagtgtcttagtttattttacgttgtggcacaaactccttatctcattcttagaccagtaacagtctgcataccaaacttagagtaataaatcaatatcaacctccaccaagatttcaggtgatataccaagggtctcttaggcctaaccaataactttgtttaaaaaaaaaaaaaatcaaccacctgcgccatggttaaaactgcactagcttcaggttgtaagaggagccttggtttaatagcagttcaagtgggaagggtttaaggacagtgttggattacattaatcttatgggataacaataacagtatggggttgtggcaaaaaagctagagtagatttaccatacattgttaagggtatggtcctctgaagaaaggagatatttctattagactctatgctggttttgtgtttagatcagactgtcatattttatgtggaactttgactaagtttagtttgaagggtgagcaacttggataatgaagcatttagaaatcatgattaggagaaatctggagaagaaaacggtgggtgtgaaatttcagatactagaaaatctgctctcattctggagagcagaaccaaaatctctaagggagcagatttaggggaatgttactgaaaacattttttttttttttgagatggagtcttgctctgttgcccaggctggagggcagttgtgcgatctcagctcactgcagccttgtcctccccagttcaagcaattctcaagcctcagcctcccgagtagctgggactacaggcgtccgccaccatgcccaactaatttttgtttttttggtatagatagggttttgccatattagccaggctggtctcgaactcctgacctcaggcgatccatccccctcggcctcccaagatgctgggattacagtcatgagccaccacacccggccagcttaccttagtctataaagttaccttataagctttttaattttttagactttttttttttttttttttggagtgtagtggtgccatcttggcttactgcagcctcaacctcccaggcgcaagcgacaggcacacacaaccacacctggctaatttttgtatttttagtagagatgggatctcactctgttgcccaggctggtctcaaactcctggcctcaagcagtcctcccaccttggcctcccaaagtaatgggattatagatgtgagccactgggcctggctaggaaaatcttaagtgtagtttaaaaaatgattttatagactgtgagtttcttaagagcaaaatttaaaaaatgattttttttgtgttgaaatattttaagaccattaaattatgaatacttttttatgagcaaatagattgaggtagagcaataaaataattcttaaaacaagaaagataaagcatctcattgccttttgatttaaatctcatcagcataattcttttactactctgaatgccattttggatattcattacagtctttttttctatataatttttgtgtagctcatactgtgctatgtataatgtatttacttaatataactttttctggcttggtattacttcactgaatgaatatgtaggatgggtaggatatacctaccatacttaatagttttattttattttattttattttttttgagataggatctcattctgtcacccaggctggaatgcagtggtgcgatcttggctcactgcaacctctgcctcccaggttcgagcaagtcttgtgcctcagtcccccaagtagctgagatgacaggcacgcactatcacgtccgtctaatttttgtatttttggtagagacagggtttcgccacattgaccaggttggtcttgaactcctgtcctgaagagatccacttgccttggccactgaaagtgctaggattacaggcatgagccactgtgcctgtccaatagttttattttaaaatccagtgagaaacaagataagacatatgagttttaggaactgttcagattctttgatcccactggagttattttttgttgtaaattgattgaaataggtgttttcttggattttgaacatcattaaacaaaaaggttttggtcgtagtaaatttcacattgcttatgtctttatcaaatttagtgtaaagatgccaggtgtggtggctcacacctataatcccagcactttgggaggccaaggcgggcagatcacttgaggtcaggagtttgagaccagcctggccaacatggtgaaaccccatctctactaaaagtacaaaaattagctgtgagtggtggtgggcacctgtaatctcagcgacttgggaggctgaggcaggagaatcacttgaaccccaggaggcagaggttgctgtgagccgagattgcaccattgcactctagcctgggcgacaagagcgaaattccatctcaaaaaaaaaaaataaataaaaatttattatattgttttacttgtaagaggaacgtagtagtaggacacagcttgagtcttagaaatattttaagttattgcgtgttctcttgtttatatcaaaattattattaggtctttactccatttatttattgtattcttttttcgttttgtattgctgttgctatttgagacattctgaattgagtgacatagtcatttttccctttggatgtcaagcattataagtagccattgcatggctggatgtggtggctcacaccggtaatcctagcactttggacggctgaggcgggtgagtcatctgagatcaggagttcgagactagcctggctaatgtggtaaagccctgtctctactaaaaatacaaaaaaattagccgggtatggtggtaggctcctgtaatcccagctacttgggaggctgaggcaggaggatcgcttgaacccaggagatggaggttgcagtgagccaagattgcgccactgcactccagcctgggcaacaaagcaacaactctgtctcaaggaaaaaaaaaaaaagtaggcaatggattagataatttctccctttttcttattgctcaaatgaaggcaacaaatacgggatgtgtggaactgttgacaaaggctggcatactgatattctcagccttctaaatttcagaaggtttaattttgttgaaggctggcattacagtaattagtattagtttgttcatgatgctataaagatacatggtaatagggaaggatatgagctggaagtctcagcatggaactgagtcagaatcttgaggttggaagtgacttctggtcttttctggctacatacaaagtcatttgatcactactttttttctttattcattaaataaatactaccaatttaataatgacagctaacacttatcaagtttgttctatatgccacactaagtactttttacatgaactattagctaatgatagtgacctattagttaccatgttataaaaaataatacagcattttgtgtgatgagagctattttctccttgatttgtggttggttgctaatgcattaggatatgcttatttgtaaactttctcatattgagagtgaatcgatttgtctcgatgttgtagtaaaggcattcttgtaaaaagcagttttttttgtctttctatattgtagaattgcagtatgttagaagtacttgaggtggatgatcacttcttaaaaataaaataagacaattactcgatatactctcaaaagatcatgatttctagaactgaacactgtcctgaagcctggagagagccaggctttgtgggtatagagtgggtctaaactgtgggtcagagccatgaaggggttgggagtaatggaaacatacttaatcttggctgcatctttaacagctgcatttttgttttgttgattcatttgcctcatttcctaattataaatatattaatgttgaggggtatgggtgtttcggttatgtgtgcattttggtagaaggtagggataggaggggatacatcttattagagaaaaataagaacagagggattttggtttttctctttccttgattccccagagccctttgttacctctgtactaatcagtagctaccagtaatactaaagtgttaagtggaaaagttgtttaacttattaaacaatgtggatttaacaataaaaataccagcagaattagcacagagaacagatttctttcatgatttcaaagggtaatatgagataattgcacattttccttccagtggatttctcatccctctttttctcaaagttatcaaaccttcagttgaccagaagtcagtgctttgacttagagaccctacatgttagttcctcaaaaattaccattagtgacatggaactcaaaccagcagtcatcctctttcggcaatgattgcacttacactattaaatctatagtgaggctagtttcaaggtctcatgggaatgaacacatagcgatgcttctcgacttaccatggggctatatcccattataaattggaaataacataaaatgcatttaatatacctaagttacggaacatcatagcttagcctagctaccttaaatgtacccagaatgcttatattagcctgcagctgggcaaaatcttctaacagaaagcctattgttgacaaaggctggcatacttacattctcagccttgtaaatttcagaaggtttaatattgttgaaggctggcattatggtaattagtttgttcacgatgctataaagatacatggtaggccgggcacggtggctcatgcctgtgatcgcagcactttgggaggccgaggtgggtggatcacctgaggtcaggaggtcaagaccagcctgggcaacatggtgaaaccctgtctctactaaaaatacaaatattagctgggcgtggtggcatgtgcctgtactcccagctactcgggaggctgaggcagaagaattgcttgagtccgggaggcggaggttgcaatgagccaagattgcaccactgcactccagcctgggtgacagagtgagactctgtctgaaaaaaaaaaaagatacatgataatagaggagggtataagctggaagtctaagcatggaactgagtcagaatcatgaggttggaagtgacttctggtcttttctggctatatacaaggtcatttgattgctacttttttttgttactcattaaataaataccaccaatttaataatgacagctaacagctaacatttatcaagttatagtaaaatgttgtatatctcatgtaatttattgaatcctctagtgaaagttgaaagtaaaaaagagaatggttgtatgagtaccataataaagtggaaaaattgtaagtgaaaccatcagtttgaaccatctgtgttggttttagttcattgtcaaaggaatacatatctgcatagaagagaactttgagaagcttatggaaggccaggtgcggtggcttatgcctgtaatcccagcactttgggaggccgaggtgggtggatcatttgaggtcaagagttagagaccagcctgaccaacatgtgaaaccccgtctctactaaaaatacaaaaattagccaggcgtggtggcacatgcctgtagtcccagctaactgggaggctgaggcaggagaattgcttgaacctgggaggcagaatttgcggtgagccgagatcgccccactgcactgtagcctgggcaacagagggagactccgtctcaaaagcatatggaagaaattaatgagccataattctgttactcatagataaatcattggtacattttttccagtctttttttctatacattttaaaatcagctctcaattaaattgagtgattgggagaggggatagccttcaaagataatctcagatcttgattaaaattctaggcaaatcatcattatctggagtgacttgcagtaggaaacttggccctctgctggcctaagtagttagtggttgattagtactaaccgatatcccctaaagggattatggtcatagctttaaggctgggatgctgttggggcaaaaggggagatcaggggtttgcacagctggacctcctatcttatgcttcaatcaaaggaacccctgggtttggtcagggaaggcaatcatttaaccagctgtgtccaaattatagagtccataaagtaaaaagtctgctaatctccgcacaccatgatcaatgttgaaaacatggaagaaaaccagattatctcccagtaattgagagtttatatagaatgtgcagttctgtatcctctctatgaatgggtttttgattatgatctcagtataatggtaatggatcattttgaagttggaagaatagttcagtctggtatggctacactagttagggaacctattagattttgcttgtgacacttgagagaaatgggaaatagcaagattggcagtaggttcatttgtgggataagtagttcaaataatccaatatttaacagttctaaaattaaattgctattcagttgcacaaaggcactttagaagctcttttttttgtggggaagttggccttatgtgattctctgtatatttgtggtttcactttacatgactcatttacagttgtgtattaagtctaatacaaggatctttttttttttttttgagacagagtctcactctgtcacccaggctagagtgcagtggtgcgatctcggcccactgcaacctccgcctcccgggttcaagcgattctcctgcctcagcctcctgagtagctgggattacaggcacctgccactacacctggctaatttttgtatttttaatagagatgggatttctccatgtcggccaggctggtctcgaactcctgacctcgggtgatccgcccgcctcggcctcccaaagtgctgggattacaggcgtgagccaccatgcctggtctgtcttactttttttaaacattagaatatcctagcatatggtggatttttggaagaagcttgactacttgtttcacgtatagcaatgtacagctagaatactaatttactgttttataaatttatgaataaaagttattacttgttaactagtgtttttttcccccagtttctcttcagcaacgggtagcagaattggaaaaaattaatgcagaatttttacgtgcacaacagcagcttgaacaagaatttaatcaaaagagagcaaaatttaaggagttatatttggctaaagagggtaagttcataagtctcgcaccaacttcaatgcgaaaactgccttaaagtgttgagtttcttggtagtagtgttaattttatcattgaataaaccttgattttatttgtacttgcataataaaagaatactgtttaaaggctaggttaagaatgggattgaaaaacaagttgaaaaatgccttcttcagattttgccttgttttttgatcttactgttcatatttaggttgcatagccttgagataagagaatgttattgctcttaacatttgggatacagttgtgggcaaactaggattgttggcattctaataacagctttagctatgttatctttaattccatgaaacatcagttttacccaacaaatattcagttatttatcaataaatatttatttaatatctactatgaggcagacattatacttgtgttgggtatacagaaagaggaaaattcatgtggttctttaacttggttgaactcaatgagcaaaacagatgttaagtaattgtgtgatgagtcgttaaaacaggaaattgcaggctgggcgcggtggctcacacctgtaatcccagcactttgggaggccaacgggcgggggcggatcacctgaggtcgggagttcaagtccagcctggccaacatggagaaaccctgtctgtactaaaaatacaaaattagctgggcatggtggcgcatgcctgtaatcccagctgctcgggaggctgaggcagaagaattgcttgaacccaggaggcagacgttgaggtgagctgagattgcgccattgcactccagcgtgggcgacaagagtgaaactcccatctcaaaaaaaaaaaaaaaagaaaaagaaactgtataaggaaaatacatgagagaacatgttgggggacctgatttgaaggatcagggaaggggcttaccttctgagtatcgacctagaataatgtgaatgtagtttccacagctctctagaccagtgattctcaaagtgtgattgtggaacagcatcattatcgtcatcatcacctgggaaagttgttagaaatgcaaatgtttgggtcccacccagatttactgagttagaaactgtgggatttgggtccagctgcacactaaattttgaaaactgctctagtctataatagaatagtggctctcaaattcaaatgtggataaaaatcacctggagagcttgttaaaccacagtatgtttgggtggagcccagaaatttgcatttctaataagctcatagatgattccagttactgctagttcaagtactacagtttgaaaaatcctgttctggactagtgatcatgcaccttttttaacttatgaactctgtaaaatatatacttacatacaaccttcatacatgttaaagttgatgtttaaaattttttgcttgaaaagatgtgaaggataaaattttatattgttgatatttacaatttaaatgaaagcttcgtccttttttttttttttttttgagatgggagtctcccccgacatcttcccctgtcacgcaggctggagttcagtggcactatctcagctcactacaacctccgcctcccatattcaagtgattctcctgccctgccccagcctcccgagtagctgggattacaggtgtgtgccaccatgcccggctaatttttgtatttttagtagagacggggtttcaccatgttggtcaggctggtctcaaactcctgaccttgtgatccgcccgcttcggcctcccaaagtgctgggtgagccaccacgcctggccaacttcctgcttttaaacatatccagtggaatgaaaatatcagtgatttatccattgttatctgtttaacaaacacatgaatagctttatagccgaaattttacagtggttttcctccttgcgttgggttttcttctttacatctcctttagaatttttttcttaaaaatggttttgaaacttgagtgtgcatttgtttcattcatttttttttttttttgagaccgagtctcgctgtgttgtccaggctgaagtgcagtggtgtgatcttggctcactgcaacctccgcctcctgggttcaagcgactcttgtgccttagcctccctagtagctggggctacaggtgtgtgccaccacgccctgctaatttttgtatttctagtagagacggggtctcaccatgttggccaggctggtctcgaactcctgacctcagatgatccgcctgcctcggcctcccagagtgctgggattacaggcgtgagccaccacaatgggcttgcgtgtgcatttgaattacctaatagggttcgttaaaacaaggattactggcttcccccctcagagacgctgactcactagggcactgggatccagagtttgtgtttttagcaagttaccagttggcggagatgttactgttcagagaccatactttaaaaactactggcctaaagtaacatcttgtgcttggaactcttaaaatatgcatataaatgttttctttacggagatattattaaaatttattataaatacacagttgatcacattatggatattttacatattactatgaaaataaggccaggcacggtggctgacacctgtaatcccagcattttgggaggccgaggcaggcggatcacaaggtcatgagttcgagaccagctgggccaacatggtgaaactctgtctctacaaaaaaaatacaaaaattagaaggcatgttggcatgggtctgtaatcccagctactcagaaggctgaggcaggagaatcgcttgaacctgggaggcggaggttgcagcaagctgagattgtgccactgcactccatccagcctgggtgacagagcgacttcatctcaaaaaaaaaaaaaaaaaaaaaaacagactaaaaaataggaaaatataaaaatcattggaaatgcagctcttttgagatatattggttctcattaaatcgttaatctctggatgcatattatttactgctagaaaaagatagcttgtcagcatcaattctattgtagttttatttttttaaacatataaatgccaagaacccttggtctcatgagtgagtaaatagaaacagagttttattacagcaattattattcaattctcttagctgtttctaaattatatgttaaattacatagttctttagcatcaaaatgtttttatcctatcagctaacaactgaattaggtctgtcttcaattttgttgaaagaggacttgcgtccacctgacttgccaaaagatttgttacactgttattagtcattcactttttaattattgacactaattttagttatccctctgtgaggcagagtctcactttttcgctcaggctggagtgcagtggcacaacaatcttggctcactgcaacctctgccccacggttcaagtgattctcctgccttagcctcccgagtagcagggattacaggtgtgtgccaccacacctggctaatttttttgtatttttagtagagacagggtttcaccctgttggccaggctgatcttgaactcctaacctcaaatgatctgcccgcctcagcctcccaaactgctgggattacaggcatgagccaccgtgcctggcctcatagaggagtttttaatacaacaggacaatgaaccatagtaaaatactatatgatggaaggttcttaggccttgtagaatttagccctggcttggaaaggattactgactgtggtatggaatggagttccattttttcatggctttcaggagggctgttttttattttcttttataggctggtaagtaggtgggaaagctgatgttcatgtctagtcatggtggcactctgcaagacactgtggaggttgggatgaatgagatatatggtttctattcccaagaaagaatagtctactgtggtagataatacattttgcacagtatcatcatttcaagatgtattgtgtgtcacaagaaatagtcctgtctggactaggcacggtcgcacatgcctgtaatcctagcagtttgagaggctgaggcgggtggatcacctgaggtcaggagttagagtccggcctggccaacatggtgaaaccctgtctgtattaaaaatacaaaaattagctgggcctggtgatggtgtgtgcctgtagtcccagctacttggggagctcagttaggagaattgcttgaacccaggaggcagaagttgcagtgagccaagatcgcgccactgcactccagcctggtcgacagagcgagactctgtctcaagagaaataagttctatctggttattcagtatctttacatgaatttatcgtctcccttttaaaatttgttcatgtttttgaattaatcaagcaccactgtcaactctgaaatgctatattcttgtcaagatgacctgtaatacatttgatgtatatataaaaggttgtggtagtattttctctggtgataagttgaaacccagcagtatgatgctggctaatgatatccattttctcctttacctcttataccaaaacctctgtagcttgttcatcctgtctacagctaattgaagtcagtcttgtctaaaccttgtttgttttgctttctttttctctgtccccaataaaactgttagggttcctttgttttcttattttctttgaaattataaaatagaattttcccaaaaactctgaagaaatgaaaatgactaagaacctcccatttctgaaatgcattatcaactgcagttttagatctgtgaattaaagagcttgtaacatgggttggttcagaaaacatgcttggtttgttaagattgcattgatgcatctaaacccggtaaatgggctttttgtgtactgttgtatctttactgtccagagcgctcagtaaactcagttggccacagcgaacagttggggtagctttttacaaaatttcaaaaaaaatactgtgatcctttttgagtttttggtggcgttcctaaagaaaatgcatagtatataaaaggtcaatgctgattattagtttttgtcttggccgttagcctatatcataataaaaatcaaatgtgaagatttcccctgagacagcagcttttattgtatctactgtgaagtctaaatctagtctttaatgattgccacaggtgtttacagtataaaccaggattttgatgtggacagcagtctttgttttatctttcaggaaaaccaggtcaaggtaaccctgaaagtccaaacattggtttttccccaataggtccagcttttgctttagtgttgtcatagctgtgtttgcacttgtttggagaatagctgaaatataagtgcaaatggtaatgagaaatgcacctttttacttctcttactgcctgttcttttcttagtacctattcttttttttttttttttttttttttttgagatggagttttgctctgttgcccaggctggagtgcagtggcacgatcttggctcactgcagcctccgcctcccaggttcaagtgattctcctgccttagcctcctaagtagctgggactacaggcgggtgccaccacgcccagctagtttttgtatttttagtagagttgggctttcaccacgttttccaggctggtcttagtaccccttcttttccaagccgacttcaactgggaatgttataaatatttctgaaagttttttttttttttttgagatggagtcttgctctgtcacccaggctggagtgcagtggcacgatctcggctcactgcaagctccgcctcctggcttcacgccattctcctccctcagcctcccgagtagctgggactacaggcgcccgccaccacgcctggctaattttttgtatttttagtagagacggggtttcaccgtgttagccatgatggtctcgatctcctgaccttgtgatccgcccacttcagcttcccaaagtgctgggattacaggtgtgagccaccatgcccggctatatttctgaaagttttattgcttttctgttgaagtattttctgattcagcttttcctaaactaacttcagagcttggcattacagcagtgtttatgttttgtgctttggaaatttgtagtgttggcaatgagtaagagacggttacgtgaaacacagaacaaaaggccatatagttttcaatttgacgaaaaatagtaggaatagagcttatagctaatcaccagaggacactgaaattttctactggtgttcagaaggtctttatacatggttgtaatttatataaagctgttacgctaactaatcagaatttcaatagtgaaaagctagatttaggaagctatctgtggttccagtgccataaacttgcacttagatagggaaatgaaaacagagtatataaaattaacaaaacccattagtaatactgtaaacaaacgattagaaattaaaatagtgtttgctaatagatttaaccagtagagacgatacagaggttttagtaaattagaaaccagtactgagttcttcctcctagtgagacaaagagggaaatatgaaagaatataaagacaaagaggatgaattaagagccttcaacacacatctgaaaagagttccagggcaagagaatggaaggaatagtaaagaatatttgaagagataataacttagatttttactaataaaaaatgtgagtccttaacataaatactgagtaccaaacaggaaaaataatagtaaattcaggccgggcatggtggctcacgcctgtaatcccaacattttgggaggctgaggcgggtggatcacttgaggtcaggagtttgagaccagcctggtcaacatgatgaaaccccatctctactaaaaatacaaaaaactagccgagcatggtggtgcacatctgtaatccctgctacttgggaggctgaggcaggagaattgcttgaacctaggaggcggaggttgcagtgagctgaaattgcagcactgcactccagcctgggccacagagtgagactccatctcaaaaaacaaaacaaaacaaaaagtagtaaattcataccttgacacatcttttgtaagatagaacatcaagaatcaaaagaaaatgtgaaaagctaccagagaaaagaaacaattacaatgacaggagatacttcataaacaccatagatgccagaagacaatgaaataagatctccaaagtgcagagaaaaaataattgtcaacctaaaattttatatgctgctaaattatgtaagagtgagggcaaaatagatattttaggcatataaaaactaagcacttagccatctacataatcactaaaagtactgctagtaggccggctgcagtggctcatgcctgtaatcctatcactttgggaggccgaggcaggcggattgcctgagttcaggagtttgagaacagcctgggaaacatggtgaaaccgtgtgtctactaaaatacaaaaaattagctgggcatggcagtgtgggccgtagtcccagctactcaggaggctgaggcaggagaatggcttgaacccgggaggtggaggttgcagtgagccgagatcttgccactgcattccaccgtgggcgacagagtgagactctgtctcaaaaaaaaaaaaaaaaaaaaaaaaaagaactgctggtagagtgatagacattcgcaaaaagaaaacatagaggaaatatataggatgtaagaaataggataggctgggcacggtgactcatgcctataatcccagcactttgggaggccaaggtgggcggattgcatgaggtcaggagttcaagatcagcctggccatcgtggtgaaaccccgtatctactagaaatgcaaaaattagctgggcgtggtggcaggcgcttgtaatcccacctactcgggaggctgaggtaggagaattgcctgaacccaagagacagagtttgcagtgaactgagatcgcgctactgcactccagcctcggtgacagagcaagactctgtctcaaaaaaaaaaaaaaaaaaaaaaaatataagaaacaatacaaaatacagaaattgataaatttaaaaatttttttttaatgtttatcttttgagatgaagtcttgctctgtcacccaggctggcgtgctgtggcactatgtcggctgactgcaacctctgcttcccaggttcagtcgattctcctgccctagcctcctgagttgctggaattacgggcacctgctaccatgcctggctaatttttggaggagacacatccccacttattctttgaggctagtgttatcctgacctcaaaaccaaggaagacatcacaagaaacttagcccagtattacttgggaatatagatgcaaaaattctcacaaaagaactagcaaatcaaattaagctacaggtaaaaagaatcacacagcatgaaaagtgggattcatctcaggaatgcaaggttggtgcaacacctgaaaatcagtaggataaaaaacagagacacatgatcatcttactagacacagaaaaagtatttgacaaaacctaacactgttacatgataaaaacactaaaataggaatagaagggaactttgtcaacctgaaaatgggcttctacaaaaaacttacagctaacatcacacttaatgtttaaagaccaaatgcctttcccctaaaatcagaaacaggacaattatgtacactctgaccacttctgttcaacatctagaagtgaggatctatgtagggcacttacccaaagaaagaaagaaaaaggaaaggaaaggaatccatactggaaaggatatatatatatatatatatatgtagttttctgtttgctggcatataacttttaaaagccttaacaattttaaagtgataggtgtctttgttaatgagctgactgatggctggcagcccctaggtaatttcaggataggggatggtcaccagaaagaccaacacaggattagaggttggaacttccaaccctacctcccaacctccagggagaggagaggagctaaaggttaagttgatcattagtggccatttaatcatgtccatgtaataaagcctctaataactaaaaaggatagggtttggagagcttccagataactgaagatgtgaaggttcgtggtgggtggtgccccagagagggcgtagaagctccatgctccttcccacgtgccttgtcctgtgcacctttttctctatatcctttgtaatagtctttataataaactggtaaatgcaaataaatgtttccctgagttctgtgagcccattaacaaattaatcaaacctaaggagatggttgtaggaacctcgatttatagctggtcagtgagaaacacaggtaaaataattttgaagcttacaattgatatcagaagtggacttcagtcttcttagactgaattttcagcttgtatgatctgagttatttccaggtagatagtgtcagaattaaattagaggacacccaatgggagtatgctatcaaaattactgattggttactggtgggcgaaaagtagtatgtgaattatatctcaatgaagttgttacaaaaaagtacagtaagccaatgtaagtaaaaaaagattactaacgagaaattactggtatcagaaatgaaagaggagactgtactctaggtcccatatatagtaaaaggataatataagaaaattatggaacaacttcatgattaataaccttccaaaaaagaaagcactatgcccagttgtgtttactggtgagttctatctgccatttaaggaagaaactataccatgagttatacgaatctctctgagtctctattctctataatctttcagaagatagaaacagagggaatacttcctaactcattctatgaggtctgcataatcctaatctcaaaaccatacaaagacatttaatgaaaactacagacttacatctgtcatgcacatagatgcaagattccttgacagtatcttagcaaatccaatccaacaatgtataaaagttatacactgcagccacgtggcatttgtgtaggtacgcaagactggttcaacattcaaaaatcaatgtgtaacttaccatatttgaggtgatggatatgttaattgcactgatttgatcatttcacaatgtatagatgtatcagaataccactttgtacccaatacatatatacaattactatttttcaattaaaaagtttaggccgggcgtggtggctcatgcctgtaatcccagcactttgggaggccgaggtgggtggatcacgaggtcgggggttccagaccatcctggccaacatggtgaaaccccgtctctgctaaaatacaaaaaattaaccgggtgtggtggtgcacacctgtaatcccagctactagggaggctgaggcaggggaattgctcgagcccagaggcagagattgcagtgagctgagatcatgccactgcactccagcctggtgacagaatgagactctgtctcaaaaaaaaaaaaaacaaaaaaacaaaaaaaaaaaacatatatatttttttcctttttgaggtggagtctcacttcatcacccaggctggagtgcagtgccgcaatctcggctcactgcaacctctgcctcccaggttcaagtgattttcctgcctcagtctcccaagtagctaggattacaggcgcccgccaccacacctggctgatttttgtatttttagtagagatggggtttcaccatgttggctatgctggtctcgaactcctgacctcaatctgcctgccttggcctcccaaagtgttgggattacaggcgtgagctaccacacccagcctaccagagaaatttaacaaggatattgaaataattaaaaaattaaacagaagtcttagaactgataaatagattttctcaactggaaaattcatcagaggctctcagtagcaaaatggatcaagcagaggaaagaagcagtgaccttgaagacaggctgtttgaaaatacaaagaggacaaaaaagaataaaaagcagtgaagatgacctacaggatgtagaaaattatttcaaaagaccaaatctaagaattgttggtcttcaagagggagttgagcaagagcaagggtagaaagcttattcaaagaaatagcagaaaactctccaaaacttgagaaggatataaatatccacatgcaggaaggccagaggacaccaaagagatttgtcccaaataaaaccaccccaaggtatataataaccaactctcagtggtcaaggacaaagagaggatcctaaaagtagcaagagaaaagtagcaaataaccctaatggagcttcagtcagtttgtcaacagacttcttagtacaaaccataaaggtaaggaaggagtggaatgacaccttcaatgtgctgaaagaaaaaaaaaatttaacatctaagaattgtatatccaacaaagttatccttcaaatatgaaggagagatacattctttcccagacagaagtttgagagaattgaccactaccagacccatcccacaagaaatgctaaagggagttcttccatttgaaatttaaaaaatgctaacacaccaaaaaaaaaaaaaaaaaaaaaaagaaaaagaaacacactggtaaaattaagtacatggacagagttagactcttaatactgcagttgataactctagtataaagcccaaaagacaaatctaccaagaatagtaatagctatggcagcctattcagagataggtaatgtagatacatgtaagttgagacaactaaattcaaaatgtggggaaagtggagctaagttgtagaagtttttttcccacttatttctttgtttctattttttaagataagttgtctttaaagtaacttgttatctacaagatgttttttgtaagccttgtgataaacacaaaacaaaaacctataatagattgactaaaaataaaaagcaatgaattaagacatactaccagaaaaaatcacttagccccaaagacagaaagaagagaggagttacaaaacaaccagaaaacaagcaataaaatggcagtagtaagtcctttcttatagataataacaacactgaatgtatatggactcagttctccaatttaaagcctgagtggctgaatggttaaagaaacaagccccaactatatactgcctacaagaaacccactttggctgggtgcagtggctcatgcctgtaatcccaatattttgggaggttgaggtgggaggatcacttgagcccaggagtttgaggccagcctgggcagcaaagtgagaccctggctctacaaaaaataaaactggctgagtgcagtggctcacacctgtaatcccagcactttgggaggccagggtgggaggattgcttgagcccaggagatggagaccagcctgggcaacaaactgagaccccatctctactaaaaaatacaaaaattagccagatgtggtggcatgtgcctgtagtcccagctacttggaagcctgaggtgagaggatcgtttaagcccaggaagtcaaggctgcagcgagctgtgattgtgccacagcactccagcctgggtgacagagcaagaccctatctcaaacgaacaaagcaaaaattagctgggcatgctggcatgtgcctgtggtcccagatacacagtaggctgaggcaggagagttgtttgagcctgagaggttgaggctgcagtgagccgtatttgtgcctctgcactccagcctgggtagcagagcatgaccatgtctcaaaaaaataacccaagaaagaaacccactttacctgtaaagatacacataaaatgaaagtgaagagctagtaaaggatatttcatgcaactggaaaccaaaaaagagcaggagtaagtaagtacacctacgtcagattaaaatagactacaaatctaagacttaagaacagctaggtgcagtggcttatacctgtaatctcattgctttgggaggcctagttgagatcacttgaagccaggagtttgtgattagcctgggcaaccctgtctctaaaacaaaatttaaaatttaaaaattagccaggaagctgggtgcggtggctcacgcctctaatcccagcactttgggaggccagggcgggtggatcacctgaggtcaggcattcaagaccagcctggccaacatggtgaaaccccatctctactagaaatacaaaaaactagcctggcatggaggtgggtgcctgtaatcgcagctacttgggaggctgaggcaggagaaccgcttgaacccagagggcggaggttgcagtgagctgagattgcgccattgcactccagcctgggcaacagaagtgaaactccatctcaaaaaaaattagccaggcatggtggtacatgcttgtagtcccagctacttgggaggctgaggtgggagaattccttgagcccaggagtttgaggttgcagtgagctatgattgtgccactctgcatgccaagtctgggtgacagtgaaactgtctcaaaagaaaaaaaagaaaagaccgtaaaaagaggaaaaaagggtcatataataataaaggggtcaattcagcaagaggacaattataaatatctatgcacctaacactggtacttccaagtacatataaaacaattagccaatctgatgggtgagagagactgcaatacaataatagaggactttgtcactccactcttagtaatggacagattatccaggcagcaaatcaacaaagagacatcagaattaaactacacagtagatacggaaatccttgaaaaaaatactagcaagctgaattcaacaacatattaaaaagatcagccaccacgatcaagtagattactcctgaggaggcaaggatggttcgatatacacaaataaagaaatgtgatacatcacattaacataaccaagaacaaaagccatatggttggccaggtgcagtggctcatgcctgtaatcccaacactttgggaggccgaggcgggtggatcacttgaggccaggagtttgagaccagcctggccaacatggtgaaactccgtctttacaaaaaattcaaaaaattagccgggcatggtggtgcacacctgcaatcccagctactctggaggctgaggcatgagaattgcttgaacctgggagatggtgttgcagtgagttgagattatgccactgcactccagcctgggtgatggagtgagagactgtctcaaaaaaaacaaacaacaacaacaacaaaaactgtatggttatatcaatagatgctgcacaagcattcagtaaaattcagcacctctttatgatacaaaccctcatcaaattgtgtgtcgaaggaacatacctcaaaataatgaaggccatccatacatgacaaacccacaactagcatcatactggatggggaagagttgaaggcctttcctctgagatctggaacaaggacgcccacttcagccagttttatttaatatagtattggaaattgcagccagaacacttaggcaagagaaataaagggcatccaaattggaaagcatgaagttaagtttgtcttgttcacagatgacacagtcttatatttagaaaaacttaaagacaccaccaaaaaactgttgactgataactttagtaaaatcacaggacacaaaatcagtacacaaaaatcattagcattaatatataccaacagtgaacagcctgaaaaagaaatcaaagcaatctcatttacaatggctacaaaacacacacatacacacacaacacagaccatctttccatttgtatgtgtgtcctcttcaatttctttcattggtgatatatatatatatctctctctaggaatatatatatatatctaggaatatatatatatctaggaatatatatatatctaggaatatatatatatatctaggaatatatatatatatctaggaatatatatatatatctaggaatatatatatatatctaggaatatatatatatatctaggaatatatatatatatctaggaatcaatttaaccaaagaagcgaaagatctgtaaaacaccaatgaaagaaattgaagaggacacacatacaaatggaaagatggtccgtggtcatggatttaggagaattaatattgttgaaatgacaatactatccaaagcaatttacagattcaatacaaatcctatcaaaataccaatgacatttttcacagaaacagaaaaatcttaaaatttatatggaactgtgaaataccctgtatagccaaagctatacttagcaaaggtaacaaagctggaggaatcacactatataacattaaaatttactacaaagctatagtaacccaatcagcatggcactggcataaaaactgacacgtagactaatggaacagaatagagtacccagaaacaaatccatgcattttgcagtcaactcatctgcaacaaaggcaccaagaatattcaatgagaaaaggaaagtctcttcaataaatggtggtaggatgactgggtaaccatttgcagaagaatgaaattaggccccatctctctccatatatacacaacaatcaaagtagattaaagacttaaatctaagacctgaaactatgaagccactagaggaaaacacttgggaaacagacattggtctgagcaaagatttgtgtgtgtgtaagacctcaaaagcataggcaaaaatagacaaatgggattgcatcaggctaagaagcctctgcacaataagggaaacaaagtgaagagacaagctacagaatgggagaaaatatttgcaaactacccatctcataagggattaataactacaatgtatgaagaagatttgttaaagaagcaaatcttatttaaacacaaaagattcaaataggcatttttcaaaagacgtaaatggccaagaggtatgtgaaaagatgctcaacatcactaatcattagagaaatgcaaagcaaaactacaatgggatatcctgtcaccacagtcaaaattgcttttatcaaaaagacaggcattcatccactgatggtgggaatgtaagttagtacagccactgtggagaatagtatggaggttcctcaaaagactaaaataagagttgccatatgatccagcaattccactattgggtatatatccaaaagaaatgaaatcgctgggcatggtggctcatgcctataatcctagcactttgggaggccaaggcaggtggattgcctgagctcaggagttcgagaccagcctgggcaacatggtgaaaccccgtctctactaaaaaagcaaaaacaaaccaaaaaaaaacccaaaaattatctaggcgtagtggtgcctgcgtgtaatcccagctacttgggaagctgaggcaggagaatcgcttgaacccgggaggtggaggttgcagtgagccaagatcgtgccactcactgcactccaacctgggcaacaagagcaaaactccgtccaaaaaaaaaaggaaagaatgaaatcctgtcatttgcagcaacatggatggaactggaagtcattatgttaaatgaaataagccaagcactgaaagacaagtatcacatggtctcacttgtggaggctaaaaaagtggatctcatgagaagatagactagattggtggtacgaaggtcagggaaagcgggggtctggggagatgaagagaagttgattaatgggtatgagtatgtggtttgatagaagaaataagacctagtgttaaacagatcaatagggtgactcttgtttacagtaatctattctagatttcaaaatagaagaattcgaatggttctagcataaagaaaagacaacccttggtgtccatgggatgaaagaaaaaaaaaaccgacaaatatttagggtgatagatacccgaactacacccagtttgatttttacaagttacattaatgtattatcacatgtactttaactatgtacatgtgcatcaataaaaataaaatgcaacagtaacaaaatgaacagccacattaccaaatgggcagaagacccaaacacctcactaaagagtctatacagacggcaagtaagtatatgaaaagattattagactgtgagaatggcctaaatccaaaatactgccgataccaaaaaatgctggtgaggatgtggagcaacagcagcattcattgctggtgggaatgcaaaatgacgtagccactttgggatgtaagtttagtgctttcttacaaaactaggcatactcttgccttttgattcagcagtcatgctccttggtatgcaattaaatgacttgagaagctttgtcccaaaacttgcacaaatatatttataacagctttattcataattgtcacaacttcgaagcatggaagatgtccttcaataggttaatggatgaatacactggtatattgagacagtggaatattattccatgctaaaaaggaatgagctattaagtcatgaacagacatggaggaatgttaatgcaaactactaagtgaaagaaggcaatttgaaaaggccatatactgtatgattccaagcatatgacattctagaagaagcaaaactgtggaaacaaaaaaaagatcagtggttgccaggggtaggaggaagagggggtgaatatgtagagtacagagaatttttagagcagtgaaactattttatatgatactgtggtggtgggaacatgtcgttacacatttgttaaaacccatagaatgtagcacatttaagagtgaaccctagtgtaaacgaagtgggtgatgatagtgtgccagtgtgggttcatcagttgtatcaaatgtgccactgtggtacagggtgcctgtagtagaggagtgtggatgtacaggggtgtggggcatatgggaaacctctgtattttctgctcaattttgctgagaacctgaaactgctaaaacgtttattaaaaaaataagaaaatacagttatgcattgcttcgtgatggcgatacattctcagaaatgcatcgtttggtgattttgtccttgtgcgaacgcggaatgtactgacaaaaacctagatgttatatagcctactacacatgtaggctacatggtatagcctattgctactaaactgaaaagctgtacagcacgttactgtactgaatgctgtaagcagttacaacacagtgatatttttgtattaaacatagctaaacaggctgggcacggtggctcacgcctgtaatcccagcactttgggaggccgaggtgggcggatcacctgaggtcaggagttcgagatcagcctggccaacatggcgacactccgtctttacccaaaatacaaaaattagcagggtgtggtggcacatgcctgtaatcccagctacttgggagactgaggcaggagaatcgcttgaacttgggagttggaggttgcagtgagccgagatcatgccactgcattccagcctgggagacagagtgagattctgtctcaaaaaaaaaaaaaaaccccaaaaaacaaacaaaacccaaaaagcaacatagctaaacatagacaagatgtttggcagtatgatgttaccatggctagatgtcactaggcagtaagaatttttcagcccctataatctcatgtaaccactgttgtgtatgttttttgttgttgactaaaacgtgattattttgcatgtgactatgtgtctgagatttgtctcacagtatatatggagtgcatatggatggattggggatgatttgccatgagtgtatggttactggagctggctggtgcatacatgaattttataataatttttggtatctggtagggcaaatttccccacttactcaaaatgatcattacctttttgttaaactttttcttatgtaaacatttaaaaatagacaaaagtaggcaaaacagtataaagctatgttagacagtatataaagtattggcatgaaaatagacaatttttatagaacagagttccccaaatgggaccctcacaaatgtgaaaatttgaaatatgacaaagatgacattgtcaaaatgggaaaagactgggacaatgggcataggacaatgagaacgtctatacagataaagcaggtttcagtttcacacctgatacctgtgaacataatatatgatatattgagactgtgatattctaattaatgagtgaagtagttatcaacagtcaacaatgttgagggctaagaagtaactgcaaaagaacattaaggtttcaaaacctgcgacgtaagtaaagatgtaacatatacgcactgtaatgataaacccaaattcctgacagttgttacctcagaggaaggtagtgtatttgtgatgttttgtttcctgaagttaaaaagaaatggaaggagatgtagcaaaatattaaaaatgatggatctaggtgataggtaataggtgcccattataggattttttatattgtttctatgcttgaagtagtttataatgctttatagcattagtataggccaggcgtagtagctcatgcctgtaatcccagcactttgggaggctgaggtgggcagatcacttgagcctaggagttggagactagcctgggcagcatgacaaaactccctctctacaaaaaaatacaaaaattagctgggtgtattggcatgtgcctatagtcccagctacgtgggaagctgaggtgagaggatcacttcagcctgggaggcagagattgcagtgagctgaggtcgcaccactgcactctagcctgggcgatagagtgagacgctgtgttaaaaaaaaaaaaaaaaaaaaaaaaaagccgggcgcagtggctcacgcctgtaatcccagcactttgggaggccgaggcaggtggatcacgaggtcaggagttcaagaccagccaggccaagatggtgaaaccctgtctctactaaaactacaaaaattcgccaggcgcagtggcaggcgcctgtaatctcagctactcgggaggctgaggcaggagaatcacttgaacctgggcggcagaggttgcgccactgcactccagcctgggcgacagagtgagactgtctcaaaaaaaaaaaaataaattattagtataaccaaatgaagtacttgaatcttgttttgatcttaatttaaacaaatattcagaaagacttttttttttttttttttttgtcaattggagaagttttaccagagatttggtattagttatcaggcagttgttaattttgttttgtgtgacagtggtactttgtttatataagaaactgtccatatttttagagatgcatctgtacagtacgttagataatgtagtatttctggggcttgctttaaaatactacaggaaagaaaaaggatagtttaaataagcatggcaggctgggtgtggtggctcacgcctgtaatcctagcactttgggaggctgaggcgggcgatcacctgaggtcaggagttcaagacaagcctggccaacaaggcgaaaccccgtctctactaaaaaatacaaaaattagctgggcgtggtggcacgcgcctgtaatcccagctacttgggaggctgaagcaggacaatctgttgaacccgggaggcagaggttgcagtgagccaagatcgtgccactgcactctagcctgggcaacaagagcgagactccgtctcaaaaaaataaataagcatggcaaatcttaataccttttgagtcttggtgaaagctatatgaaggattgttgtagtataccctcaacttttgaatatgtttgaaaatcttaataattacatatacagcagtaaaagcaataaacgaatgttagaactcctactgttggcaaacataatgtttgaaatgctttactacaaaaaattaagattttctaactttattttaaatttctgtctcctgtttttttgtatttatatatataaatataacattcatatatatgttcatatatatatatatatatatatatataactaaagttactgttgaccaagtcttcctccaggctctctatttcacttttaagtgccaaaaatggatatttaggcttggtatttgtttacagtttttctgttcataatgacaacatggtagtgaatagctctgggtaatctccagcaaatcaaaagtaccagaggtaattagcatgaggacctgttaagtgtataaacttgagccttgataaaattgtagtacccaaaaatgaataaagtatcccagaaataatgctttttcttttttcacattttatgaaacagtttaacactcagaatacagagttgacacacataaacttttcctttgtggtttcacgtgtttacatctttctgggtctgtctatttgcatgcctaccacaacttcccaggtgtctgtctttaagggacttcacacaattacttttttaattaatgttcttaaaactgtctttggctagagattcaaaatattttaagagtgatggaaactgatgttgagagagtaaagatttcaaaacaacttagcatgactaggtgtttccctctgtgactttgactaccaaatcattaactcctgtgataacaatgaacatttcacaacgtttaaaagttctcttattttactattggatttttataagtagttagaaatttatgcaagaaagtattgccactgtcttcatgaggaaactgaggcttgagaatcttgtgatttccttaaagtcatacagctggttagcggtagaattagaccttaaatcagtttattttcatggtcagtttggctcagttattgtgctttggagaggaaattgatacttttacaaagatgaagaattttttttttcataaataccttacaactttagatgctaaaaggcgtaagttaaggccgggcgcggtggctcacacctgtaatcccaacgctttgggaggctgaggcgggaggatcatttcagcccaggaggccaagaccagcctgggcagcgtagtgaaactttgtctctacaagaaatttcaaaaattagccgggcgtgatggtgcatgcctgcagtcctagctactcaggaggctgaggtggggggatcgcttgagcccaggaatttgaggttatagtggtctatgtttgcgtcactgcactccagcctgtgcgacaattgagaccctatctcttaacttttttttttttttttttttttttttttaaagaaacacagcggctgactgggaaaagttttgtaagagaagacagacttaatatccagaatatataaaatgctcttacagatcagaaggaaaatcattcattagaagcaaatgtaaagaatgtcaccaaagaggaaatgagtcactagtacatatatgagaagatgctcaaactccttattaacagggaaaatgtagattaaagtgaccatttgctacccatgatatttacaagaatttttaaaagatggaaaatagtgactgttgttaagggtatgggaaaacaatcacacatccctgtatactgttgataagttcatcttttttttgaagttagtttggccaaacatatgttctgcctgggcttaaaccatgtagtaggcacattacatcaacttagtatttaaaagatggtaagagggagccgagaaattaatgctaactttaaagaacatacgtctagtcactgccatgtgctctggctttcttttctcttttattaaacattttttgaatgtttgtggaaggtaatgtactaattagcgtttccaataaattatcattacaacaaccttgtgaggtggctgtttttaacttccattttgcagatgtggaaacttaggccagagagattaaataacatgaccaagttcatttagtcagcagacgggaatgcgtaaattgagctctaaaaccatgactgtaactactggatcattagatagatagtaacaattgatttgtgatacccagcttaccttaaatctcacctctattaaaagggtgtcattttgtatgtttatattttaaaatttaataccttatttctttattggaatgccagtctgatcaaagtgaacattaatggactatcttttacttttctctccagaggatctgaagaggcaaaatgcagtattacaagctgcacaagatgatttgggacaccttcgaacccagctgtgggaagctcaagcagagatggagaatattaaggcgattgccacagtctctgagaacaccaagcaagaagctatagatgaagtgaaaagacagtggagagaagaagttgcttcacttcaggctgttatgaaaggtaaagacagagaaagatcaattttgtgattttctaagatatccgattctgatgattgagaatattttcagagaatcttaaaatatatacagagtttcatttgtggttttatgtactgtcatcatcaagatatactttcagataaaagagaagtcactaataacataaatggatatatcaatcgtatctaacttaataatggagagttataatagggatgttatagagataatgcattaaatgaggactatagttcattgtaaggcttaaaagtcgatttcttctaggaggcaggctagtaatctcaaataattaagctgtatgggcacagggaatgtgctggagtagagagagctgccatgcaaagggtaaagtaactgtttacattgatgagcttcagctaattattgcccttccagtgtagtttggccatacgttttagaatttttttttttttttttttttgagatggaatctcgctctgttgtccagcttggagtgcagtggcgcagtctcagctcactgtactcgctgcaacctctgcctcccgggctcaagcgattctcctgcctcagcctcccgagtagctgggattacaagcatgtgccaccacgcccagctaattttgtatttttagtagagacgggatttcgccatgttggtcaggctggtcttgaactcctgagacctcaggtgatccacctgcctcggcctcccaaagtcctgggattacatgtgtgagccacagcgcctggcctggtttagattttttaagaaactttgtatgtgaaatcttcactgcactctgttgggtagaatggcctatgggctaaggtaggcttcatgggctgccagcttatgacctttcgtctaaaagaagagacgtagtttagtctcagactccttttggcactagtgctgaattacttcccaaatttctgagaagatgatgatgaaacaaagtaagtggtcactgaatctttgagttcctggaattagttaatattctattttattttttactttttgagatggagtctcactctgttgcccaggctggagtgcagcggcaccatctcggttcagtgcaacctccgccttccaggttcaagcgattctcctgcctcagtctctcaagtagctgggactacaggcgcccgccaccacgcccggctaattttttgtatttttagtagagactgggtttcaccatgttagccaggatggtctcgatctcctgacctcgtgatctgcccgcctcggcctcccaaagtgctgggattacaggtgtgagccaccatgcttggcccagattagttaatattctaaatgtgaaatagtgatgactttttccaccgtgtttgcaattgtgtatcactttttgccttagtgctctttataaaaaggcaggtgaggctagccctatttctgagtgtatagctatggcctagagattactctaggcttcatataacaaacccaactacagtggcttaccaaattaggagttcctttttctcccagaacacgaaatccaaaggtagataatctaggcctggttttgtattggttccatgatgtcaacaatgcctcaaactccttcagcccttctgttctttcatccttagcatatggttttcaacttaatctttgcctcagctgaaaaatagctgcttctccttcagtctgcatcagaaaagcaaaaattttctagaagtacccagcatatccctttcgctttgttgaccaagtgtgtggtcactcataactacaagggaaactggacaatgtagttttaaaattgcgcacattgatttcctaaacaaaattggagtcttactggtaaggaagaaggagtggaaattaatgggcaatcaacagggtctgttacctagtggtttttttttttttttttgagatacttaggcttgagtgcagtggtgtgatcttggctcactgcaacctccgcctcctgggttcaggcaattttcgtgcctctgccttccaagtagctgggaccacagacatggcgacatcacacccaaataatcttttcttttttttccctttcccttcccctttccttctcttttttttgagacagagtctcactctgtcacccaggctggagtgcggtggcatgatctcggctcactgcaacctctgcctcccgggttcacgtgattctcctgcctcagccttccgagtagctgggactacaggtgcctgtcaccacgcccagctaatttttgtatttttagtagagatggggtttcaccttgttggtcaggctggtctcgaactcctgacctcaggtgatccacccgcctcggcctcccaaagtgctgggattacaggcatgagccaccacacccggcaatttttctatctttggtagagatggggttttgccatgtcggccaggcttgtcttgaaatcctggcttcaagtgatctgcccgtctgcctcccacagtgctagggttacaggtgtgtgtgagccactatgcccggccacgttttaagattatattaaagagaaagcgatttttttaaagaccttatagagtttgcctcaacttacaatcttgggttctggtaaactattccagaaatatatcccttttcgtatactttcaggtagtgggattggggcgacatgttatatttgccttgggagccatagtatagtgtctaagaacatagattttggagttggccttaagttcgaattctagctttgcttcattctgggcatgaaacattggccagactatttaatctttcctaaggttttctccttcgtaaaataatatatgacacaggtttattgtgaagattagaagtgatgatttaaagcccttatttctgtatataataagaactacaactagtttgtcttgttttttagtgaattaaacattttccagaaattagacgtaagctttttatataactttaaaaaatttagtgtgccaggttatttttttttcataatgcttagatgtgaaatatgtggtgatgttttgtagaaacagttcgtgactatgagcaccagttccaccttaggctggagcaggagcgaacacagtgggcacagtatagagaatccgcagagagggaaatagctgatttaagaagaaggctgtctgaaggtcaagaggaggaaaatttagaaaatgaaatgaaaaaggtatgaaggaatgtgttcatttgtagaaatatttgaattcaaatgcaaaatgctttaatattgttgtgtaatagaaagtaatagaagtactttgatatttcctgtgagaataattatttggacacagacctaaacatagtactaaataatgttatatctatggctaactctctcaccttcttcacatttttgatcaaatatcactacttcatggggtttttcccgaccacccgccatttaacattgcaacctgccaacttccctctgccacctgtcactactctcctctcccttatccttctctagtttttctctttccatagcacatatttccttatactacacagagttcacctattgtgtttattgtttactgtctttctttccttgctaaaatataagctctgtgaaggcaggagtttctctttctctctttttttttaatagcttcaggggtacatgtgcttgttttttatttgtatatcctaaatgcctagcatagtgtctaggagataggtgcttgaactcctaaataccagttgagtgggtgttgttgcttgatgattgtgtctaaagcaaagttttagaatagatgttagttttccttctttctcggtatcctttggtttctgtgtaccacatattatgtaccacatatgcttgaacataataccatataatacttgaacatagggcaactaaatgtaaattgagacattttatcattgagaaaatattaaaagctttttagctagtttaaataaacttttacattattttatatgcatacacatttaaaatcacattgtataaaataattagtaattgatttttcttttcaattgaattgatcatgcctttttggttcctaattcttagttcattcttcaaatgcatgtatattcatgatttccacagtctttcaattttagaactgtttttgattatctgaaaaattgggaagatagtacagagttcctatatactccatgcctagtttctcctgttgttaatgttttacattagcatggtacatttgtcacagctaataagcctctatcaatttattcttattaactgaagtccatttttgtattcagattgcattagtttttacctaatgtccttttttttctgttctaggatcccatccaggataccatattgcatttagttgtgtctccttagatgcctcttggctgtgacagtttctcagatttttcttgtttttaatgacctttctgtcattttttaaagtgctttttaaaggttttgtttatgatgacattcagcacttggaattgtgaagtcatatttatattaataaataacttgatttgtgatcagttctttgcttcctccctccttttttttcctgttgttttttatcagatgacctttataagcatcctaaactagccttgactgagatattttaacttgtcttttccaaatagtatttaattcaaaataaaataaatgatggctttgtgtaaggacctgaaaacaaagtgaatctgaacctgttttttgaggggtatgttatttggggaaaatccccctcacgtttgggcatttatgatatttttccctatcgtgcacaacttagtataactttgcactcatttaaattcagtgaattaggttttcagtttctctagaaggaaaaaagccaactttttgagcctgcctttgtttctctgcgtgtaagtgtatgtgtatataagaaatgaaaattcattttctcaccagtttactagtttatgtaagttggttccttttaatccatgtttttgagaatggacttgggaaagcaatgatagttttaaggggtcactctttgtgtttgtttcatttagatggtaaaagtaaaatagtatttaaagtactctgtttaattggatggaagcctttttatagcaacataattttctaacattttagaaaacacgttattctattttgggtgtttaaaatgtaatcagccctttcattattcataagaaattattgtctcatgaacttactaacccaggaattttaaaaattatttattatgggctgggcgcggtggctcacgcctgtaatcccagcactttgggaggccgaggcgggcggatcatgaggtcaggagatcgagaccatcctggctaacacgatgaaaccctgtctctactaaaaataataataaaaaaaaaattagctgggtatggtggcaggcgcctgtagtcccagttactcgggaggctgaggcaggagaatggtgtgaacctgggaggtggagcttgcagtgagcggagatcgtggcactgcactccagcctgggtgacagagcgagactccgtctcaaaaaaaaaaatttatttattatgtgtatttccttttatatatgggatattttcttaattgattaagaagtcaaatttgttttagtgaatcaattttcccatttactcccgaattctaaatggaatatttgggaaaactcagttataccttgacattcaaagtaatgcactatttgaaagttagacattagttcagttttgcgaatattaatatagtgtctggtcaagttacttgttataataatttttagcaaatggaagggttagagtttcttagaaaagcagtaaatgaataagtcgtagcatttaattctttttaaccataggcccaagaggatgctgagaaacttcggtccgttgtgatgccaatggaaaaggaaattgcagctttgaaggataaactgacagaggctgaagacaaaattaaagagctggaggcctcaaaggttatgaaacattgtaatccatttgcttgaaacccaagtttctgccccaatgccatgaacaaaattagaatcagtaatagggaaaaaaacctgtaatttagactatgcatcttaagaatctttctttaaaatgcaaaaaactgccgggcgaggtggctcacgcctgtaatcccagcactttgggaggctgaggcgggcggatcacctgaggttgggagttggagaccagtctgaccaacatggagaaaccccatctctactaaaaatacaaattaaccaggcatggtggcgcatgcctgtaatcccggctgctcccagcctcgggaggctgaggcaggagaatcgcttgaagcccggtggcggaggttgcagtgagctgagattgtgcctttgcactccggcctgggcaacaggagcgaaattctgtctcaataataaaaaataaatttaaatgcaaaaaactgctttgagatggttttgctcttatggacatttaaaataatcacaataatgatgttttatcacaagtggctgctttgtcacaaagttaatgttcattttcttaagaaaatgagaccccgtctcattcattttcctattaaggaaaataaactgttcgaagttgaccttgttttctgatgccagctccagcattgatcttttagagataatgtagctatagtattgctgaatttgttggccataaagacacagcaaaagaattaaagtaggaacaggccaggtgttgtggctcacacctgtaatcccaatacttcaggaagctgaggcgggagaattgcttgtgcccaggaatttgagaccagcctgggcaacatagtgagacccctgtctctacaaaaattttttaaaaagccagacacggtggtgcatgcctgttgtcccacctacttgggagactgagatgggaggattacttcagcccgggagtttgagactacagtgaactggcactccagactgggtgacagagtgagaccctgtcccccacacccaaagaaaaaaaggaagaaagtaggaacaaaagaagcataagaaaataaaaacaatatgaaaataaatgggaatttatcaatagtcttggtaaatgtaaactgatacctatgtttaaaagagattatcacattggattgtaaaaatctaactttatgttacttgtaagagctatgcctaaaatcaaaccacaaggtaagactgaaaatattagccagttatagtggtgtgtgcctgtggtcccggctacttgagaggctgagatgggagaattacttcaacccaaaaggttgaagttgcagtgaaccatgatcatgccactgcactccagtctacgtgatagagtgagactctgtcttaaaagaagcctgggcgcggtggctcatgcctataatcccagcactttgggaggctgaggtgggtggatcacctgaggtcaggagttcgagaccagcctggccaacatggtgaaaccctgtctctactaaaaatacaaaaattagccaggcgtggtggccacgcgccttgtagtcccttctacttgggaggctgaggcaggagaattgctcaaacccaggaggtggagattgttgcagttacctgagactgtaccactgcactccagcctgggcgacagagtgagactccatctcaaaaaaagaaagaaaaaaatactgaaaataaagggataaaaatataccatgtaaattcgaaccaaaagaaagctgatataccaagtgtagtatcacaaagataggataagggggaaaagccactaatagagataaagagggatcctatctaataaacagttcatcaataagatataatagtcatgaacttgaatgcaccttacatagtcatgaaatgcataaactaataatgacaattacaaggagaaactgactttcacaaatatagtagcagattaaaattgacctttacagaatacaatcagaaaaaattattagtagagctatagacattttgaactatcaggttagttatttagttgtaattgacacacagaactcggtatccaagagtgagatggtatcgcatacagtactagaacataatagttaagagctcagcatttagtagcctgggttaccttgggcaaattacttaatcatactgtgctttgattttctcaactgtgaaatggggataataagcccaccttaatagtcaccatatggctattatgaggaacatataaattaatccctatagtagccactgtatggctattatgaggaacatataaattaatacctataaacctttaggatagtacctgggacaaggtatagttatttttagatacattatcttagaattgaggttacacagacccaattctgtaactatgggttattcaggtatttacgctaaaatgatagttaaaatgcttggacatgaaaaaaatactcatggaaaaagtaattacaaaatatttagaatgatgtgaataatgccagatctttaaaaaaaaaaaaaaagtacaaactgagccgggcgcagtggctcatgcctgtaatcccagcactttgggaggctgaggtgggtggatcgcctgaggtcaggagttcgagaccagcctggccaacgtagtgaaaccccatctctactaaaaatgcaaaaaattagctgggcgtggtggcgggcgcctataatcccagctactggggaggctgaggcaggagaattgcttgaacccaggaggcagaggttgcagtgagctgagatcttgccattgcactccagcctgggcaacaagagcaaaactccgtctcaaaaaaaaaaaaaagtacaaacaaaataaatggaaatgaataatataaacataggaatttgtgaaatagaaaagcaaaagaacaatagagactatcaatataatgaaaaaatggaaaaactatagacaaatctctggtaagactgatcaggaaaaatgaaaacaaaaatgagaaatcagaagtgagtccgagtgtagaggctcatgcctgtaatcctagcactttgtgaggctgaggcagaaggatcacttgagcccaaggagttgaggctgtggtgagccatggtggctccactgcacgccagcctgggcaagggagcctgtcttaaaaaaaagaacataactacaaatcagtagaaatttaaaaataacaaatactataaactgtcacacaaataaatttgaaaacagatgaaaaaatttctaataaaagataattagcccaaattattccaaaacaggaaaggtagtcagtaattattaaagaaagtggatctagagtaaaaaatcttattgtctcttgcctcctctcaccaaaagatattaaactgttgattttacaggtaagtttttccagactttctggaaagagcaaattcttatattttacgaactctcagggaatacaaaaagagagaaagctctccaactgtttttatgagactagtagatcttcactacaagtgagcaaacacatagaaaggtagtatgagaagaaattatagatctgtctcaggaatacagaagctaaaattttcaacatcgtaggtaaaataaagggggagaaatacatcatgaccaagtagggtgtattcccagaaatttatcggaaaatctatcattgcagtgtacacgtgaaatgattgtagaagaacagcattatattcattttggattcagagaggtatttgagaaatttgaccactcaataacttagtaaagggctatttatcaaacctttggcaaacatagttaagggtgaatatttagcagccttaccattaatggtgggaacattctggggcagacccatgctcagtaattcagaaatgaggcataagaactggaaagaaagcaacgagactgattcaattgtctgtataaagaaaccagagaatgtacaacagattgttagacctaataagagttcaacaatttgaaagttgttcaaacaaaatcaacatactaagataattgtttttctatgccccagtgataaccagttgaagaatgcagtggtggaaaaaagattgatcctattcacaagagtaaaaaaaaagaaaaaaaagaaaaagaaaaactagttagctaccaatatagctaaataaagatgggcagggtccttatagactacataataaatgaggacctgaatctgtattttcctgaatgaaaagatagagcattgggccgggtgcagtggctcacgtctgtaatcccagcactttaggaggccaaggtagggggatcacctgaggttaggagtttgagaccagcctggccagcatggtgaaacccagtctctactaaaagtacaaaaattagtcgagcatggttgcggaagcctgtagtgccaatctctcaggaggcagaggttgcagtgagctgaggtcgtgccactgcactccagcctgggcagtagagcgagactctgtctcacacacacacagcattataaagtagacattgtatccccaaatttttaaattttacttaaatttcaatagggtttaattaggaacttgataattcagttctagaagtagacttcatatagagaagtgaaggaacaggaaaatacttagcaaaattttgaagacaagatgaggagacttggcctacctaccagatagcaggaccacagtaaagctactataattaaggtagtttgttactggtttagggataaacaaatggatcaataaaacagaaagcccagaaacagacctatatatgtgtaaatttgatatatgacaggtggcattacaaatcagtgggtgaagaatggattgttaaaaaataccctttttggctgagtgtggtggctcgcgcctgccatctcagcactttgggaggccaaggcaggtgggtcacctgaggtcaggagttcgggaccagcctggccaacatggtgaaaccctgcctctactaaaaatgcaaaaattagctgggcatccgcctgtaatcccagctacttggggggctgaggcaggagaatcgcttgaacctgggaggcggaggttgcggggagccaagatcgcaccattgcactccagcctaggcgacgagtgaaactccgtctcaaaataaataaattattatctggccatgtgcggtggctcatgcctgtaattccagcactttgggaggctgaggtgggcagattgcttgagcttaggagttcaagaccagccagcacaacatagtgaaactctttctttacaaaaaatacaaaaattagccagatgtggtggtgcatacctgtagtcccagctactcgggacgaggcatgagaatcatgagaatcacttgaacccaggaggtggaagttgcagtgagctgagattgggccactgcactccagcccgggagacaggtttatttctaaaccggtaacgaactatcttaattatagtagctttacttcaagtcgtactatctgataggtagacccactctctccaccttgttgtcttcaaaaagatttctttctttcttttctctttttttttttttttttttttttgagtcagggtcttgctgtgttgcctaggctggagtgtagtggcatgatcttggctcactgcaccctccacctcccaggttcaagcgattctcctgcttcagcctctcaagtagctgggattacaggcgtgcaccactgcacctggctaatttttgtatttttagtagagacggggttttgtcatgttggccaggctggtctcgaacccctgacctcatgtgatccactcaccttggcctcccaaagtgctgggattacaggcatgagtcactgtgcctggcccaaggtttcctaaataagacaaaaatattgactgtgaaaggaaaactggcaagtttagctacattataatataaagttctttgttaaaagatactattaatacaaaaagttgaaaagagaagctacagactataagaagatatcaatacctcataactgacaaaatattaatatccaaaataataaaattgctaagttggctggacgtggtagctcacacctgtaatcccagtatttagattgcttgagaccaggagtttgagaccagcctgggcaacatggagaaaccctgtctctactaaaaatacaaaaattagccgggcatggtggtgcacgcctataatcccagctacttgggaggctgaggcacaagaattacttgaacccgggagatggaggctgcagtgagcgtaggttgtgccactgcactccagccagagcaacagagtgagactctctctcaaaattgccaagtccacaagtgacagataattctgaagaaaaacaggtaaagtggccgagcgcagtggctcgtgcctgtaatcccagcactttgggaggccgaggcgggcggatcacgaggtcaggagatggagaccatcctggataacacggtgaaacccggtctctactaaaaatatgaaaaattagccgggcgtggtggcgggcacctgtagtcccagctacttgggaggctgagtcaggataatggcgtgaacccgggaggcggagcttgcagtgtgccgagatcgtgcctctgcactccagcctgggtgacagagcaagacactgtctcaaaaaaaaaaaaaaaaaaaaaaaaggaaaaacaggtaaagtatagctaggtggcgcatgcctgtaattccagctacttgggaggctgaggcataagaattgcttgaacccaggagccagaggttgacgttgcagtaagctgagatcgcggcaccaccctccagcctgggcgacagatcgagactccgtctcagaaaaaaaaataaaaaaaaataaacaggtaaagtgtatgagctgtcggttaacaaaagaggaaaccagaatagtcaaggagtgtgaaaagatagtcaacattcaaccacactagaaattggggaaatgtaaatgaaagtgggacatcattttaccctaaccaggttgtaagggttatagagaaattggttgcattcaccgactactggtgtatgtgaaactcttccgtttaaggcactgttgtcacattgtcctcccagttgactgtttttggtttctcatgaccctcattgcttctctgtattttctcctgcatagatcctgataccacgtacatttttctgaataggtggctttcagtggtttgtttgtaccctctccttgtcacctggctttttgtagatgtccatttgttgttggttttggtcattccagggtatggaactcaaagtaattcaaatagtatgtcactattgccatcatcttcccagggtcctgctcagtagttttcaaatattagaaattcattattaattaaaccaaatgtttattccaaaaagtaataactggtagaattagtgggttatataccaccattttaaatctgccatacggactcttttaccatcagctgaattaccaccgtcctcaggtgttagagaaagtatttcatgatagttgcaactttaccattctttgttcatatcatgtgctggactgtcaaccttcagtgaagcatcaaatgattgcttaaatggtcatttaagtctttgactattattgcatgatggcctaggagtaaagataactgaaaacagataagccactttaagtttgaagaaataggaagataaaaggcatgaaaaggaccttgaatgtgatattagatataaccatttgaaaaagttgaaagttaactaaagggttagaatttagaatggacaatttatgtgacagtctaaagtgacgtaatccttgattttctggggaagaattgtattttttttggttataactttcctatattagactatattgttactattttgagtattacacttaattgatcaacagaaaaaaagtattttttttaaagatgtggttttattttattgttattttttggaaacagggtttctccgtgtttcccaggctggtctcaaactcctgagctcaagcattctgcccacctttgcctcccaaagtgctaggattacaggcgtgagccaccacacctgggcaagatgtgattttaaaaagtattctgcatttgcctttaagtcattacagtgtgagactagttatttgttccattataatttcctcttttttacttccatgagtatatgtatctgtgaaaatgtcttctttttatacatttaaagcatttggaattccctcaccagaagtaaaaggaaagcaaacttaaaagtgtatggtatcgtttttgtccttagaaattaactaccgatttaaaaaagcaaaacatacctggtgttactgttatggctgaaacagatacatgcatatgttgatgtgggaatacaaattggagccgcctttttgaaaagcaagggacaaagctgttatgtgaaatctcaattgtatattttattctggtggtgtgattatggataacatctattaagttattttcccagttttctatagtacatattttataattaaaaattataaatgttaatttatgtagatgtaaaagtaagtgtaaatttttttgaggcatagccagaacttaccatcattctgtatctaagatagaaactgttgtaaatttcagtttaatggaattgcatcttctttcaggttaaagaactgaatcattatctggaagctgagaaatcttgtaggactgatctagagatgtatgtagctgttttgaatactcagaaatctgttctacaggaagatgctgagaaactgcggaaagaattgcatgaaggtaaatatactgtatatttttatctttgtctctaagaaccatataagttaaattgatgttgactaataacagtgacaaatcttaaaataacaatgcaacatgttagtgattcaatttaagccttgtagttggtttaaatgtactcatgcaaagctgaaattatggtttttccttcgtgagctcagtaataacttcacaaggtggctgggtacagtggctcactcctataatcccagcactttgggaggccaaggtgggcagatcacctaaggtcaggagtttgagaccagcctggccaacatggcgaaaacccgtctctactgcaaaaacaaaaattatccaggtgtggtgatgcgcacctgttatcccagctactcaggaggttgaggcacgagaatcacttgaacccaggaggcagaggttgcggtgagccaagctcacaccactgcactctgtcctgggcgacagagcgagacttcatctcaaaacaaacaaacaaacaaacaaacaaacaaacaaacaaacaaaacatcaccaggcgtgagctctgggcagagagataataaagctgggaatttctgcttcaactacttttccccccacactcattttgatggaggtgtattagcaaaagtgaaaatggaagagggcagagagtgtattctggaggccctaagtaacactctgtttttaaggggacaattttgatttcactagtctggtagctcagtgatacagaaattgactctattttccaggggtacattctttccccactaaaatattatgaaaataacccaaactttgagtgaagttttggccttcaggaaacaatttccaagtgtgctattgcaataaaaagacactcatattcttaaaggtgtccaaaagaactagttcagtttaaactatgtccctctaacacttccagaaataatgtaaattattgagactaccaaccttcctaataaaccttgaaaagtatccgagaaggttaattaaaatgaggaaggacatggagtaatttccatactgaaacactcacaataaaaaatagagtcttttttttgagacagaggttcattcttgttgcccaggctggagtgcagtggtgtgatctcggctcactgcaacctccacctcctgggttcaagtgattctcctgcttcagcctcctaagtagctgggattacaggcatgcgccaccatgcctggctaattttgtatttttagtagagatggggtgtttctccgtgttggtcaggctggtcttgaactcctgacctcaggtgatccatccgcctcagcctcccaaagtgctgggattacaggcgtgagccaccacgcccagcccagataggcttcttaaaagaagttgttcttaaatggagttttggaaggtgggtaggggattgtcaggtagtcagagagaagcatggcattcaaggccatttgcatgtgatgcagctaggtaaggaagtctaagaaaagcagttcagcacaattagaatacaagaggcaatgggcaaaatgtgaggttggagcagtagaaacaggccaggacatagaggtcttatgctaagaatattggacttgatcatctgggcagttcggatcctctgaaggttttttattttctctttttttttgttttgagatagtcttgcccttgtcgcccaggctggagtgcagtggcgcgatctcggctcactgcaagctctgcctcctgggttcacgccattctcctgtctcagcctcccaagtagctgggactacggatgcccaccaccatgcctggctaatttttttgtatttttagtagagatgggatttcactgtgttagccaggatggtctcgatcccctgacctcgtgatccgcccacctcggcctcccagagtggtgggattacaggcatgagccactgcgcccggcctattttctcttaaataatagttttattaagataaaatttgcatgccataaagttcactcgttaaagtatacaattcagtagtttttaatatattcacaaaattgtgccccatcaccactgtctaattccaaacattttcattacctcaaaaagaaatcctgtacccatttactgtcatttcctatgtctctacctccagcccttggcaaccactaatctactttctatctctgtggacttgcctattctggactttgatgtgaatgggattttataatatgtgcctttttgtgtctggcttcagtgaagggttttagactggagagcggtaatattagttttgcgttttagaaagttcagtctcatagcactgtggtgaatagaatagggagggcaagactgagggcagaagaataaaaaaggggcctctgttgtagttgtttaagtcataagtgctggtctaaggcagaagccagaagatagatatatcatattgcagagaaggccgagttagcaggtctctgtcatagttgaatatgttggggtgaggaaaaatcagaagtatgagttggcttgggtggcttggtagatgggtggatagatcatgctacctattctctttttagcagaagatggctgagctgatgagtatcaacaacacatacattttacaaagattccttgacttgtcataagaagtctatattaaccggacccaacgaggatttctggataacagatttatcagaatgtattaaacacaattaggagtgtttattccacctttggcctttggagcaatgtttcccaaagtatattccctagagtacttgttatttgagttgtactgtgaaaagtttttttttttcttttgtcaaataaatttgggaaaggctatattatatattaccttccaagaaaacatagacataattaagaccccgagttcaaagtcctgcagtaaagaaatctttaaaaatttatttaattatggaggagcctttgcaaaataacaataataataaatttctccctttaacttgaagtttctaagacttactaagaacagaaatctttctttgctgtattcctaggagtgcactttgggagactctgctttaaagagatggtgtggggataggttgccccttggtccagccaaggacagaatcctagagatgtggaccattggtcagacctgggctaggagccctgtgctaaagaaattgcctaccattggccgggcgcggtggctcacgcctgtaattccagcactttgggaggccgagacgggcggatcatgaggtcaggagatcgagaccatcctggctaacatggtgaaaccccgtctctactaaaaatacaaaaaattagccgggcatggtggcaggcgcctgtagtcccagctactccggaggctgaggcaggagaatggcgtgaacccgggaggcagagcttgcagtgagccaagattgcaccactgcactccagcctgggcgacagagcgagactccatctcaaaaaaaaaaagaaattgcctaccattaaaattcagtgtttttgatttgtggtgggggggttcctaaacagtttgccatctcttggagcaagagcgacaacaacacaaccagttaaaacatacgtggcagaaggccaatgaccagtttctggaatctcagcgtttactgatgagagacatgcagcgaatggagattgtgctaacttcagaacagctccgacaagttgaagaactgaagaagaaagatcaggtgaatagaagtttttaggactgatttgctttgtcagtaatgtcccccaccacatgtgattgcattaccttatgtgtattagagactgacttaagctgcaacaaggtgataaaggtgatatgtgccacttttaaaaacataacagctacatttgaggggttttgtttttcatctttagaaatggcctcctctcgggggtggggaaactgatttggaaatgatcttcagtgactgcaggatgcagcagtgcgtatttcggagaaaatctttctctcctgtgctgaccagttctcccaggccaagtcttgaggtcaagcttgtccaacctgcagctcttggctttgaatgcggcccaacacaaatttgtaaactttcttaaaacattatgagattttttttgcaatcttttttgtttgttttagctcatcagctatcgttagcgtcagtgtattttgtgtgtagccaagacagttcttcttcagtgtggcccagggaagccaaaagattggacacctgctctaagagctctactaggtgacatgatatgaatggagaggctgagtaataggaggtggcaggtgttcagagcactgcatattcaggttcctgttttctccttatcttttagttattgaaattgcatgaataatatatatatttatatacattatcataaattttttgttttaaatacagtgaaaaaataaatataaagtgatcaagtgaaaagtcttccttaacatctcccacacctccccttgtcagaagattgttttaccatttggtagagagccttctaaaccagttctgtgtgtttatgatatacatttagggtgtagttttcctcttacacaactatagttatactataagtatgtattctaggcagggcatggtagcttatgtctgtaatcccaacactttgggaggctgaggcaggaggatcgcttgagcccaaaaggccaagaccagcctgggccatatagtgagactctgtttctacaataataataagaagaataattagctgggcatggtggcacgtgcctgtagttccagctacttgggaggctgaggtgggaggatcacttgatccgggaggcggaggctgcagtgagctgtgatcacaccactgcacttcagctgtgggtgacaaagcaagatcctatctcaaaaaaaagtatatatatttcccataagcattatcctggatgtattttcatatcgacgttgtattttgttcttgagtgtagatggatgcaccatattgatttaccctttctccttgtagcgtgtatctaggtggtcccccttttcttgtcatctcaaataatcttgcagctaaatccttgaccgtattgtgtatatgtgcagatacttccctaggatagctatgtaaaagtgttcactgcctttctaagtatcttgtcaaacgtttcaaattgctttatgtgacttaggttagattttgttttgcaaagtttcttcttttttaaatttcctttttgtctcttaatttggactcattcgtcttgtgtgtagtcaaagccaacataaggatttttttttttcttttttttgagacaggatttcactccagtcacccaggctggagcacagtggcacaatcttggctcactgcaacctccgcctcccaggctcaagtgattcttctgtctcagccgcccaagtagctgggactacaggcgtgtgccaccatgcctggctaacttttgtatttttagtagagacagggtttcactacgttgcccaggctggtctcaaactcctgacctcaagttatctgcccgtctcggcctcccaaagtgctgggattacaggcatgagccaccatgccctgctctaaagtacagatcttatcctgccttccctgctgcccattaaaagagtctaaacttggccgggcgcggatggtcacacctgtaatcccagcactttgggaggccgaggtgggtggatcacctcaggtcaggagtttgagaccagcctggtcaacttggcggaaccccacctctactaaaaatacaaaaattagccaggtgtggtggcatgtgcctgtagtaccagctacttgggaagctgaggcaggagaatcacttgaacccaggaggcggaggttgcagtgagccgagatcacatcactgcactccagcctgggtgacaaagtgagactccctctcaaaaaacaaaaacaaaaacaaagagtctaaactttactaagatgatcatttaaaacttttcaacatttattgagctcttactatgtgctagcattgtgctaaggctttatgtataaatctttatgtcaagtggttatcaaaaactctccataagcagtagggactacaattatacggttcctgtgttctagaatagtaaacaggctgagacgtcatgtatggcccatctgaggcttgaacaatctctgattccagagtctaagtgcttactcaccacctctttctccatgtcctttacttctcatgtgcctgcccatttttcatccatataacattacacagaactcctccacaggcctgcttttccatgtttctgtcttttgtatgtgcctcctttctccctggaacccttaattgtctcttctcatgcaactggcaaacttaccttactgatctttcaagattcagctgaagtgttactcctttgggcctcctttgctggttccttcagatgaaatcagtcattgtttttctccttctttagaaccttgtacatacttgtattgtaattgtttgtctctcctccctaggctgttttacgtgacactgaaggtataaggtatcttactcatctttgttgagtgaattattctatcaactttaatcattccttttgtattcatatacatttgttaatgtttctaatggatgtgtaacattataaaaacttttttgggtggggtgtggtgtctcatgcctgtagtcccaacgctttgggaggccaaggtgggaggatcgcttgagcctgggagtttgagaccagccaggacaacagcgtgagaccccatctatgcaaaaaaaccaaaaaattagccaggcatggtggtgcatgcctgtgatcccggctacacgagaggatgaggcaggaggattgcttgagcccaggagttcaagaccagcctgggcaacaatgtgaaaccccgtctctacaaaaaataaaaaaattaggcgggcgtggtggcacatgcctatgattccagctatgtggagaggatgaggtgggagaattgcttgaacccaggaggttgaggctgcagtgaaccatatttgcaccactgcattccagcctgagtgtcagagcaagaccttgtctcaaaaacaaactttttcatatttattttctacagtaatcacaaggaatgttctgtgtaaattttttttttcaaggatcatttgaagaggcggttttgctttcttttattttgccttactttatacagtatacttttcttggaagctgcttcctgatttcttctttataccagtgttcttagtttgtgcttataatattaaaatattttgtaatggccagaggcccttagatgggattacaaaacaaagaagcgtaagtatccagttttctcttatcataacgctctgttctttatttgttttgaatggttaaagaactgtgtcacttattaagtaggttacttgggtcatatatatgtttttttcttccttttaggaggatgatgaacaacaaagactcaataagagaaaggatcacaaaaaagcagatgttgaggaagaaataaaaataccagtagtgtgtgctttaactcaagaagaatcttcagcccagttatcaaatgaagaggtatagtgagtctataattaaagtcattaaatacacaatgtcaacaattttagcttactcatacatcagttaattacattgttcatatgagaagtgagaagtgcatagctacgaggtgaaagttagataaaaatgacagtattttcagttgtttttatggcattataggtagcactatttgaaacatgttgcagcttcattcgctgtctgaaatagatgttcttttttccagtatttccaaaatttaatacattagaataaacctttaaataatgtctgcaaaatcttttttgatgtgaatagtacatgttgctaatacttgtcttttttgtttaaaaagagattatctaaagcgctgaaatgcttaactccctgtagcatatatgagagtattaaccagtattaggttttcatccctgacggccatgggtgaggtttggcagataacaccacagggtaaaatgtttcaggtactaggaatgggtagagtagagagacctggaagtgttaggtgttctgtggccttgtcacctctcacctacagtgtggcaagggcctcctcattgggtttcctgcctcaacctgtcccattccactgcgtcctcagcattactgtcaaattcattttcttaagtgcagctgcagtcaggccactcccctactcaaaaactaccattgactcccattacctatataattaagcacacattcctcactctgacaattaaggcccttcatcatctggattacattttagccatgttggtcatcatcttgggctgtattcccacttggtctgttggttccttcatttggagtactttcctcccattgcctttctgagtattgaaatccttctactcatctttcaaagctcatcttgttatcagtgaaggaactgcttctcttattgcctttagaataaaaactaagatcccccaagatccctagcatggcatacaagggcattcacagttgaatggcccttccagcctcacttactgctctccacctctctgtagccagacctgtgcacttactgttcatgctcatgtggcctgtccctgcggcttagaatcacactcacttccctgcggcacctcctttcctggcctggtgaatgaattgcacttaaattggatacaggtcttgtctttactttcaggggtatcatgtttctatttactttgcagatttactttgagccatacataatctacatcctggtggttatatatatgcccatgcttacagattgtttgatgtttaagaaaaacttaaaaaaaattttagtagacactaaaaagtgctgtatattgaagttgttttgttcattctttgttctgggacatagactgggaaccacttggtctaattctgctgtgcattttaaaaatatttagactcccaagagaatgtctcaagttttgggtacagccaatgattacatagtgttttcatcatgcagtaatctatccaggaatgtttgaaaagtgggaaaacaggaaagggacatttgttgtgatttacagagaagtatttttatttttgattctctcttaacagatccgtagactttcagagctggtgttttgcagtttgaatgttgaatataattgttttgtattgagaataatgacacaactcttggtttagagttaatctgaagcctagctaacatggtgtgaaaccctatctctactaaaaatacacaaattagctgggcgaggtggtggatccctgtaatcccagctactcaggtgactgaggcatgagaattgtttgaacccgggaggtggaggttgcaatgagctgagattttgctactgcactccagcctggatgacagtgagatcctgtctcacacacacaaaagttaatctgagatgctttggagagttggatttatggctaaagatatttgaaatttgtagacctcacattttctttaacctgatgcttataatatgcttttctctctacaaaatgttcattatggaaaatttgggaagtatagaaaacaccattcaaaataaaaataactgatagatcatcctacccagaggtaacaactaatattttggtatgtatctctttcttcctttccttattttcttttccagagataatatatatgttaacatatgttaacatatttcttttttttttttttttaatttgagacagggtctcactctcacccaggctggagtgcagtggtgcaatcttggctcactgcagccttgacctcccgggctcaagcggtccttctgcctcatcctcctgagtagctgagactacaggcatccgccatcgtgcccagctaattttttgtagagacggtgtttcaacatgttgccccggctggaacacatgtgtttctatttgcacttttttttttaaatttgagacagggtctcactttcacccaggctggagtgcagtggcgtgatctcagctcattgcaacctctgcctcccaggttcaagcgattctcctgcctcagcctcctgagtagctgggattacaggcatgagccaccacgccaggctaatttttgtatttttagtagagatggggtttcaccatgttggccaggctggtcttgaactcctgatctcgtgatccacccacctcagcctcccaaagtgctgggattgcaggcttgagccaccatgcctggctctatttgcacttttaaaacataatctagattataactacatagtgttttgtgcaaattttttccccaacttaaatctactctaaggttttggcacatcattaaatgtttttccctgaaatgatatttagtggctgacagaatttcagcgtgtcaatgtaccataattcttttaaccaattccctactaattgatttgtgactttttttgtttttttgagacagtcttgctgtctcacccttgctggagtgctatggcgtgatcttggctcactgcagcctccacctcttgggttcaagcgattctcgtgcctcagcctcccgagtagctgggactacaggtgcacaccaccacgcccagctatttttgtatttttagtacagacaagtcttcactatgttggctaggctggtctcgaactcctggcctcaagtgatttgcccacctcggcctcccaaagtgctgggattacaggtgtgagccaccgtttccagcttctgcctggtttttaattcataatggtgactgagtgatgacatagggagttcaatgcccctgaaaaaagttttgtgttactcacagttctcctggaagcagaggtacagcacaccttgcatggccacagcagggaagcaccagaggtggtcaggaggcaggagcaggagcgagagaaaagcatgggccatagctattattgtggtttctttgggaaaagcaaagtggagcagagcagagggtttaggactggctggtaattaattccagcagcctttggggtatagggtctgttcttagctgtctggaactggccctgggttcatttagggcaggggaaatactggctcggtgtgtgacttaggtaagggaggtggttgggatatgggtttgggattgaatggtttgtgtgtgaaaggcatgtttacagttaggtgagttgtttattatctctagaaattagctagtcctgggaagcagtttcttcacagccagcaaggcctccagtaaatcaaaacattatgaaatacagaaaatgaaaagcgtgattaacacactgatagtcaagttggttccattttttactactatacaatttttcgttataagtaatgtcataatgttatatataatttttccttgtacaaaaatcattatggatgcatctgattttattttattttattttttagtgtgagttcttaggaaaagaactgcctggccgggcatggtggctcacaagtgtaatcgcagcacttttggaggctgagacaggcggatcattcgaggccaggagtttgagaccagcctggccaacatggcggaactcatccctactaaaaatacaaaaattagtcgtgcatggtgtctggcgcctgtcgtcccagctactcactgtggctgaggcatgagaatccctcgagctcaggagacggaggctgcaatgggctgagaatgcgccactgcactccagcctgagtgacagagcgagactgtctccaggaaaaaaaaaaaaagaactgctgaattcaaggatgtaaacatttttaagatattattgccaatgtagtagtctgatgtggggtcttttgttttgtgttttttgagacagggtctcgttcttgccacccaggctggctagagtacagtggcaccatcacagctcactacagccccgatctcctgggctcaagcaatcctcctgcctcagcctcctgagtagctgagactacaggcgtgtggtaccatgcctggctaatttttaaatttttttgtagaaaggagttctctctatgttgcccaggctggtcttgtactcctgggctcaacctatcctcccacctcagcctcccaaagtgttggatttacaggcgtgagctactgcgccaggcctgtagtctgatgttttctttttttttttttgagacggagtctcgctctgttgcccaggctggagtgcagtggtgtgatctcggctcactgcaagctccgcctcccgggttcacgccattctccttcctcagcctcccaagtagctgggactacaggcacctgccaccacgcctggctaattttttgtaatttttaatagagacggggtttcaccatgctagccagaatggtcttgatctcctgaccttgtgatctgcccgcctcggcctcccaaagtgctgggattacgggtgtgagccactgcgcccagccagtctgatgtttttcaaatggccctcacaactgttctatccctagccccttccctcttcagtatcacagcagcactgtatatgatacatagcagtgggtgttagggttatttgtaaactaacagaatggcttatcccagtttttattaggatacttacttgggatctttgccatagtaagcttaatatatacgagatttgtgttcttagccattgcagtttcagatgagtaacaatctttaaaaggaaagaaatggaggcattaactcaaaatttgtcacctttttattacaccaagaatatttttaaaacattaaaaaaaataggttacatgagcttgccagtaacaacaactgtattccacagtctcctctggttcatttaaaacagggcgtttaacaacaaaacgtagaaaggatattatcttaaaacattgtcatttaaatggaataaatttagttggaaggaaaacttgttacatttttctttaaatcatttttcttatttcccactaactatgcaactgcttcatgtaatggcactggtttgctttttgccttcaggaatgtgctgtaccacgttgtttaaaaattgagataaaattcatgtaacataaaatttaaagtgtacaattcagtggcattgcatatatacacaaatgtttttagtttgaaaacatttttatcactcccaaaggagacctcataacccattagagtcactcgccattttccctttgccctagcctctagtaaccactaacttgctttatggctctatggatttacttgttctggacattttaaatagatggaattacataatatgtgactttttgcatctgctttcgcatagtatacaacattgaacatgttgattacaccttgctggaaaataccacattcttgggccgggtgcggtggctcacgcctgtaatcccagcactttgggaggctgaggtcgggggatcacgaggtcaggagagcgagaccatcctggccaacatggtgaaaccccatctctactaaaaatagaaaacattagccgggcgaggtggcgggcacctgtagtcccagctacttgggaggctgaggcaggagaatggcgtgagcccgggaggcggagcttgcagtgagcggagatcgcgccactgcactccagcctgggcgacagagcgagactccgtctcagaaaaaaagaaaatactacgttctcgtcatttcctttccactactctggcttctcctttgctcatccccaagatgttaatctttctcagggttctgcccttggccctctttgcctacacactcatcctacgtgttctgatttgctgctgtgactttaattatcattatacgatagttactctcaagtctctatcgaaagacttctgtgtccctctgtcaagggaatatctctgcttggattcatgataggcacctcgcgcttgacacacgccacactgaattgcaggtgacgttcctcaactgttcgtatttgggagctctttgagctaccagagcattcagcacatagctccagcccatccttttatcacagtattataacagtctgcttacttatcttttttttttttgaagccgtatgtatctcgaggtcagggattatatcttgctcacagttgtatcctgagggcctggttttgtgtccagcatgtagaaatgacacttagtgtttgttcaatgagtctgtgaaggtagcacattaatgattatcatgtgtaatgagtggcggaatacatttattatagtttttgtctttaaaaacgcagagaattgtctaacttggccatatgtattttcacatttcaggagcatttagacagcacccgtggctcagttcattccttagatgcaggcttgctgttgccatctggagatcctttcagtaaatcggacaatgacatgtttaaagatggactcaggagagcacagtctacagacagcttgggaacctcgggctcattgcaatccaaagctttaggctataactacaaagcaaaatctgctggaaacctggacgagtcagattttggaccactggtaggagcagattcagtgtctgagaactttgatactgcatcccttgggtcactccagatgccaagtgggtttatgttaaccaaagatcaggaaagagcaatcaaggcgatgacaccagaacaagaagagacagcgtccctcctctccagcgttacccagggcatggagagtgcctatgtgtcccctagtggttatcgtttagttagtgaaacagaatggaatctcttgcagaaagaggtgagttacctttctcacgtttttcctcttgctcacgctgaggcacactgggaagctctgggatttagcgttcattcaacagacggttcctggagtcagtgcaggcacatgttgccagcaagtggatattaacgtgtgtcacctgacccttgtcatagtctgccttgggtattccaggtaattgtgacagagaaaggagctagctagttaatcacagtgaatgtgaacctccccacctgaactcacagctctcaggttggagcaatctgcctgactagcattgcggaatttaagttagagcaacctggatttggtttgctttgcagttttctataatctcagtgtattgcaggatccaggctttcatctttcctttagatcaaaagcgcaattgccggtctgctgttgatgctgagagtgggtttaaagaggggttgggaatatgggagagaaaagaaaccaatctttaatgaagttgattttcctccttagagaatttgtaaattcacaggtaagattaggagataaacacttcgatatttgcctaatgctttatagattacaaaggcctttcacatacctgatctctttaagctttatcattataatgaggcaagtggggcatggttatctcccatttacaggtgagaaaactggctgggaaagataaagtgagttgctcaagtgttccctttgacttagtcgcaaaacctgactcctggtgctttccttgactgagggctgcttccctttaaggaagccaccggtcagtaagtggaacagcttactgaggcctgaaagaaactattctcattggtcttatgtaacacatacgtgagaaggtgctatttactagtttggtacctattttataattggagctggtgaaacggtgacttggcactgtttttatttgtctttccttccctttggttgtttagtattataccatgagtgccatgggatagtaccttttgcttgctttgtgttttcctcacatgtgatgttttgtgcctcttggcgataaattgtgtcccatgtgtcctatcatacttgtactggagagtttgattttttagaatctgaccctatattgtaactttttgccgtaaggccctgaagaaagtgtttactgcatgttctactgactaccattggtaagactatgcacgtgtacctcaagtgtgtgatgtagaattgttttgcctgataagaggtaattttggtgcccttcaggtacataatgctggaaataaacttggtagacgttgtgatatgtgttccaattacgaaaaacagttacaaggaattcagattcaggaggctgaaacgagagaccaggtgagtttcttctggatgcgccaaattggatattgtcgttttcattggaggtgcagaattaattgcccccctctccggccccagccccatttacattatgaagcatatccatcttgttaagttatgaaataacctggtacatgcaatggcagttacatttccagtgggagctcactaggactctgctttttttttttttgtttttgtttttgtttgttttttttgagagggggtctcgctctattgccaggctggagtgcaggggggatctcagctcactgcaacttccgaccccctggttcaagtgattcttctccctcagcctgccgagtagctgggattacagggacacgccaccacccccagctattttttgtatttttagtagagatggggtttcaccatgttgcctaggatggtctcaaactcctgacttcatgatccacctgcctcagcctcccaaagtgttgggattacaggtgtgagccaccgcgctcggccaggactctgtttttgtatatctgcacaggtctgcccaactcttaaagggacactacctaatctcttccaccctgccccttccgcctaaggcctaaaagtgattttaagtacatggcaagtactttatgatatggagatctcagggagataaaaggttgattgttgcctccagtagaataaaggcttaatggaatgttatattaatcagaatttgtgtccttcagtgcatattactcatttcttgtcataaatttgttgaattaaggttaataagttcccagaaattaagctttggtagatttggtatgctgagattgataaatcttcagtactttttcaagtgcagtgtttaataatgggcaccttgatagcagttaggaaataatgtagaaattcatgagagtgggcttgtcaaagtctacgtaagaaagatacttttccctcatatttccaaattgttctttggttgttatgaagattgttcccttagccttcaaaataacttcaagccaattagaatgatggtttaatattttcaaatgtcattgctattgagttccttcatacactgtgtgctttacgcatagatgtttcaaaggtaaatttctaaatgtatttgcaaaactaatgtagttggcccctgatagtgtggtgtaggaatggttttcataaacatttcagtagactgttttaaagcctggctaaaaattagtcagaaaaagaagtgggaaaagggtgttcatggagagaaaaaatatacaaagaacagagttaggaaagaaaatgatgtattgtaggaagtatgagtagttatgtggctgggcacagggggtgactgttacgaaataatgggaatgtaagctacaagggaaagccatgaagacatcacttagggaggggtgatgattgaagagatttaaattttaccctgaagccgggcatggtggctcacgcctataatcccagcactttgggaggccgaggcgggccgatcacctgaggttaggagttcatagaccagcctgactaacatggagaaaccccacctctactaaaaatgcaaaattagccaggtgtggtggtgcatgcctgtaatcccagctactcgggaggctgaggcaggagaatcccttgaaccccaggaggtggaggttgcagtgagccgagattgcagagcgagagactcttgtctcaaaaaaaaaaaaaaaaaaatttaccctgaagactttgagaggcatttagagttttaagtagggaaattatattatttcacttttataaaatttctggtgttagtgtggattgtagactggagacagaggatacactctagttagggagaacagtgtcatggtctagaggatctgagggagaagcagatgttttcagatgagatgtgtgtgaaaaatgatttgttaactgtaaaccacagtacagttgtctcttgaggtcatttatctaatttctgtctgaattagaaaatctgtggtgtttcccagaaaaagacataagagatttttttttaaaattctggagttagatttaaaaaaaaaaaaattataaaaggattctggtttttctaattgacttttaaaatgatacaggtgaaaaaactacagctgatgctaaggcaagctaatgaccagttagagaagacaatgaaagataagcaggagctggaagacttcataaagcaaagcagcgaagattcgagtcaccaggtaagggagggtttatagactgtggcccatgagggatgactgggttatttaaatgaaagattcaaaaaatatagtcatgtttttttttgccttgaagatttggcagttttattttccctcaggtaaaaagatttcttactgatcattctgtgatctctgttttacagatttttaaagaataactttcaaaataattggtcagtaaatgccaggaggttctgattctcctttcctttatttgtattagttaggttttcctgctgcactggaaacttgctgacaaagatactaattattttcttttaaactttttaaaagtatagcaacatgaaagaaaaaaaaaacatatacagatacaccaaacataccagaaccaacatctgtgtaaccaccattgagatcaagcaatagaatattagctggtaccccagaagccctcactttccccgcacttacaactccctcccgacaggcagccactgtcctaacttgtaacaccattagattagcctgtgctttaactttagaaaatgaagccatacgttctgtgttcttttgcgtctgtgttcctccgttcaacagtgtactattcctactcgtgatgcacggagtgtttgttcattttcattgttgaatagtcatatcattatacggatataccgcaatttatccagactaatgttgatggatatttcagttgtttccagttctgggatattatgaataatgttcctttgaaatttttgtatagggcgtggtggacatgtttctgcaggatatgtaactaggggtggaatgcttgggtacaaatgttcaaaatgccaaataattttccagagtggttataccagtttatacctccaccagcaatgtatgagagttcctgtggttccaaggtgtggaaaaatgtcattttgttattttaattatagccatttcggtggatgtataatggtatttcactgtggcttagtttgcatttctctaatgaccactgaagttacttagcatttttcatgtttcttggccattgggattttctgtgtgtgagagattcctgctcaagtcttatcctcatctttttattgggtggtctgtttattttactttttttggtctttaaaaactgatttgttaggtgtcctttatataatgttagaatcttttggtgataggtgttgcaggtgtcttttactcagtagcttatattttttgttttgtttttgagatggaatcttgctctgtcacccagtctggagtgcagtggtgcaacttcggctctctgcaacctctgtttcccgggttcaagcagttttcctgcctcagcctcctgagtagctgggattacaggcacttaccaccacacctggctaatttttgtagttttagtagagatggggtttcacgttgttggccaggctggtcctgaactcctgacctcaggtgatccacttgcctcggcctcccaaagtgctaggtgtgagccatgcacctggcccatcagtagcttatgtcttcattaatggtgtcttttaatgaacagaagtccttaataatgtagtcaaatttggccgggcacggtggctcacacctgtaatcccagcactttgggaggccgaggcgggcagattacctgaggtcaggagtttgagaccagcctgaccaacatggagaaaccctgtctctactaaaaatacaaaattagccgagtgtttcggcgcattcctgtaatcccagccacttgggaggctgaggcaggagaatcgcttgaacccgggaggcggaggttgcagtgagccaaggtcatgccattgcactcccgcctgggcaacaagagtgaaactccgtctgaaagaaaaaaaaaaatcaaatttattaattatttctttatggtttgtgattttcctcctttttaaaaaggaatcttttcctatggagttatgaagatatcctatattatagaggttttattcacatttatatctaaaattcctctagaacttagatacacacacacacacacacacacacacagtgtagataagggtaaaacttttttgtctcgctgtgtcgcccaggctagagtgcagtggcacgatcttggctcactgcaacgtctgcctcccaggttcaagcgattctcctgcctcagcctcctgagtagctgggactacaggcacccgccaccacgcccggctaattttttatttttagtagagacggggtttcaccatcttggccaggctggtctcgaactcctgactttgtgatccatccgcctcggcctcccaaagtgctaggattacaggcgtgagtcaccgtgcccagccaagggtaaaacttttttttaaaaaaagtatggatagccaatttctgtatgacttggtgaaaagatccacctttcccccattgctctgtgtagattagtttcagaactatcttctgttcagttggtctgtttgccttttttttgtgctaaattctgcactgtgatttatgtgaaataaaattttctctcttttttttttaaacccgagatggagttttgctcttgttgcccaggctagagtacagggtgcgttctgggctcactgcaacctctgcctcccggttttcaagcaattctcctgcctcagcctcccgagtagctggaatacaggtgcccgccaccacacccagctaatttttttttacttttagtagagatggggttttaccatgcaggccaggctggtctcgaactcctgacctcaggtgatctgcccgcctcagcctcccaaagtgctgggattacaggcataagccactgcacccagcctgattttttttttaaacatctttaaacatagctacaactaggtcacgtgagttactgtctgcctagaaacccatagaatgctctttgttaatgtatggctgcatgtgactcgggttttggcactgccttgtgttatctgaaaggccaaggctttgcacatagcagatgtgcatgcagctgttggatgatggtcagtggttcccatgaacaaataaaatgtcaattccagacactaaatagttagaagatggaagagttagtttcagaataaccgatttcctaactatgtttctatacatgtgtttttttaaagatctctgcactcgtcctaagagcccaggcctccgagatcttacttgaagagttacagcaggggctttcccaggcaaagagggatgttcaggaacagatggtaagtttacattttaagtaaatgacaactatgttactatatattccttttttgttctatcttgacatcatctttgataggaatttatcatcctgtccaaagtagttactgttgtcttctcccgggactgtagaacattaataatggacaaaatattgtaaagacattattccttttttaaacctactttctggccaaacaaaaattttttctcatcgtttaacttatttttctgatttgggaaacctaaacagaataaactatggacctaatttaatttttaattccaaataaaagctaaaaaattgaatgtctgagagccctagctggtacagcttttgaccagtcattttgtgattttcctggatggctaatttatttagaataaccttattagggctgggctgaggcgggtggatcacgaggtcaggagattgagaccatcctgtctaacatggtgaaaccccatctgtactaaaaatacaaaaaactagccgggcgtggtggtgtgcacctgcaaatcccagctactcgggaggctgaggcaggagaagcgcttgaacctgggaggctgaagttgcagtgagctgagatcgcgccactgcactccagcctgggtgacacagcaagactctctttcaaaagaaaaaaaaaataaccttattagtttcacaggggttatgaaaaaaaacatgtaactgttgtggtgctggggaccttccagaaggccatctatgctgagagggatgggggcagagtgttatgagcaagtgccggctagagcctttgcagatagtccccaggcttgggctccctcctcactagtctggctgcatttgctttgtttttcctttctcaaagttggagcctacatctgatgcctccaactaaattaaagtagaggtggctctgctggggtgattctacaaggctgatgcttacccggggatgacagtttaaaaataaaagccttgggtggaatggtcattgaatgtttttaattggcattattaggtcagtatctgaatggcctatgagctgatccctaaatcttaaacctggtctgttgggaagcatctcatcctaatcattgacccatagtttcatgtgttttctctaattagaaaatacaatataacactggcgtaaaaatcactgctaaatactgacagtttcatagcggtgagcctcctacactccttcgaccccttgcatctttttccttcttgtctttttttttttcttttttgagacagagttctgcttttgttgcctaggctggagtgtaatggcgcaatctcggctcactgcaacctcctcctcctgggttcaagtgattctcctgcctcagcctcctgagtagctgggattacaggcatgcaccaccacacccggctaattttgtatttttagtagagacggggtttctccatgttggtcgggctggtctcgaactcctacctcaggtgatccacccgcgttggcctcccaaagtgctgggattacaggcatgagccactgtgcccggcctccttcttgtctcttaaaaccatcagcccttgcagacacttttcaagctggtttcacttaaaatgaatgtgtgtcagtgacactggagaactgttgaaattaaggttgaggtcctatgaactccagtacatgaccattttgttgaaattaccataaagaagagaaactcaccacgttagtgcatgcttgcccttgttcttagtctttctgtgtatgtttgtaggtatatgatgtgtgtgtgtacgtatgtcttggtttgtgttttttgctggactgtttggagttattgtagacatgacagtcgtaagtattttagtatgtatttcctaaaacaaagagttgttctgcatcgctacagtactgttattacatccttaaaatttaaccagttgtcccagtaagtccttgattactttttagtggtggttttcctttttatattttctatattttgatccaggaaccaatcagtgatcacatatttcatcttgttgccatgtcgctttagtcacttttcatctagaacagtctcccactctctttttatttttaagaatccggccaattgctttgtttcaggccatctgtcttgtagaattcatttgtctgattatctccttgtgatttgattcaggttagacatcttggcaagaatactgcacagatgaaatggttcaatgggaggttcataacataatgaggcacgttaatgatgggtgcttccattactggggatgttaaatttgatcactcggttaaggtggggacaaaatagtttcagaatgactatatcaatattactaccaacagcaaatctactaagtaaaggccaacatttctttgtagttctgcccttagactgtatctcagataagggtttacagtttaagtactgtgttcaaatgttagtttttctctctgtggttgtattaggaatttgatatatagttagctccatttgtttctctttttttttttttgtttttgagacggagtcttgctctgtcgcccaggttggagtgcagtggcgcgatctcggctcactgcaagctccgcctcccgggctcacgccattctcctgcctcagcctctggagtagctgggactacatgcgcccgccaccacgcctggagaattttttgttttttcagtggagacggggtttcaccgtgttagccaggatggtctcgatctcctgacctcgtgatccacccgcctcggcctcccaaagtgctgggattacaggcgtgagccactgcgcctgggctgtttctctttatattacattttcagatttgatttttctttcttgatttatattttgaatatgtaacatggttcataatcaaaagtataaaaataaatactcagctccatttccattccctgtccttttcaccccatttccactcactcttatacgtaattattttaatttatttttggcttatccttctgtttttctctttacaaaaacaagcaaatatatacatattcttttttcccttctttcatatccagaaggtggtgggatactaagattttgttgtaaatgggtgacagtgatcataaagcacagtggattctagtctgaagacaataagagccagtgggctttagccagagcatatgcatggccgtgactgcctgtcttaggcctgtttgtccttcagaatgcagctcagtcatcgcctcctctgggaagtgttctttaaccctcttcccaatttcctgccccaaattaggtacccctttgtccttttatcactgcagtacccaatctctgtcatagcagtttatggtattgtagagtagtttttggtttacttgtctttctcctctattggaccatgagcttctccagggcaaagtctttgtcttttatctctgtatttcctgtgggcagcaaaacacgtggcatagagtagtagctgcacaataaacatcgtatgagagcatcatctacatgtatgtgtgcccttaaggtaagtgactttagtactacagattagcaggagtcacgtgcttttgtagagctttatctgatactcggatttggtggataacttttatattgatacaaataatatgaaatacctaaaattgttttacacatcaacaagcagaagtgggagtgtgtcccattttaagaataagcttctctggctgggtgcggtggctcacgcctgtaatcccagtactttgggaggctgaggtgggcggatcacgaggtcaggagattgagaccagcctggccaacatagtgaaaccctgcctctactaaaaatacaaaaaaatgagctgggcgtggtggtgcgtgcctgtagtcccagctacttgggaggctgaggcaggagaatcacttgaaccgggactcgggaggtggaggttgcagtgagccgagatcacaccactgcattccagcctgggctacagagcgagactgtctcaaaagaaaaaaaagaataagcttctcaagtgctctgtgattcctgagcttagatgctcttgatgacttccagtatctgggcctgctgggccattcacagtgattccgagcctaaacagaggtatacataataggaaatgaagacactactctgtttctccctcctttctgtccagtgcacgccatggggaaatgggagttgtcttagagtacatgctctgtctgatataggtcttgatggtgtcagccacttccattgaactagagatcctggtccttctgtagtacagggatatggagggaaaatattaatttttttttttttttgagatggagtcttgctctgtggcccaggatgggcgcaacggtgcaatctcggctcactgcaacctccgcctcctgggttcaagcgattctccggcctcagcctccctccctagttgctgggattacaggcaccccgctgtacccagctaactttctgcattttagtagagacagggtttcactgttttgcccaggctggtctcaaactcctgagctcaggcaatccacccacctcagcctcccaaagtgttgggattacaggcgtgagccaccacacccaaccaaaagatagaatttttaagcggtttgtagaaacagtggagaatgagcctcagatacttgcttcattgcctgtcccttgttgaatatatgctgtaaaccagaaaatctctgtgcagctttttctaagtctagcagaacttcaccataccccgtccatcctcagcactcctttagtttggacttgtttttctctggtgtagctatcaccagaccggatctacctttctggctgtgattagtatctacttctattttaggcggtgctgatgcagtcacgggaacaggtttcagaagagctggtgaggttacagaaagataatgacagtctccagggaaagcacagcctgcatgtgtcattacagcaagcagaagacttcatcctcccagacactacagaggtaacttactttccacatgatcaaaaatgtcaacaagtacgttttctgaaatggccgtatgttctttatgtaaacagttttattcagatataattcacgtgccaattcaaccatttaaaatgtaccattcagtggtttttgctgtactcacagatgtgtgcaaccatcatcacaatcaattttagaacattttcatcacctcaagtagtaactccctgtgacccgactacaccagctaaacacacacacacacacacacacacacacacacacacacacacacgaaaaagtaacacttcgccctttagctaccatccttattccccctcctcccctagccttaagcaactactaacctttctgcctctatagatttccctattctggactttcctatgaatagaatcatacgatatgtggtcttttgtgtccatgttctttcacgtagccttaatgttttgaagatctatgttatttttgtcggcccagattgagagtgtgccagaaattaaatgtttgaaggggttaccatgctggctgcttatgacgtttgtttttgtatctagtacttgaaaagttataacacactcaccatcatgctgtccataaagatgacacttttgtttctttttgagacagataatatctgtcacccaggctggagtgcaatggcatcatctctgctcactgcaacctccgcctcacaggtttaaacgattctcctgcctcagcctccccagtagctgggattacaagcgcctgccaccatgcccagctaattttttgcatttatagtatagatggggtttcaccatgtttgccaggctggtcttgagctcctgacctcacgtgagccaccatgcccagccaaagatggcacttttggtcacttacattcttctgtggttgggtaaacctgggctacaaaactggtttcccagagacattcataattctctccttaactttatccaagcttaatttttaatttttattttttgagacacagtttcattctgtcccctaggctggagtgcagtggtgtgatcttggctcactgcaacctccgcctcctgggttcaagtgattctcctgcctcagcctcccgagtagctgggattacaggcgtgcgccagcacgctgggctaatttgtttctgtatttttattttttttattattttttattttatttttattttttgagatggagtcttgctctgtcacccaggctggagtgcagtggcgcaacctaggcttactgcaacctctgtctcccaggttcaagtgattctcctgcctcagcttcctgagtactgggacaacaggcgcgtgccactgtgcctggcaaattttttaaaatattttttagtagagatggggtttcaccacattggctaggctggtctccaactcctgacctcgtgatccgcccgccttggcctcccaaagtgcggggattacaggcatcagccaccgcacctggcctttttttgtatttttagtagagatgcggtttcgccatgttggccaggctggtctcgaactcctgatctcaggtgattagcctgcttcggcctcccaaagtgctgggattgcaggcatgagacaccgtgcctgtcctatccaatctttatacctgtttctttttttttttttttttcctttttaaggaaatcttagtaagtagaagtttcccctaattataccctacagattcaatctctataatttggacctcattcttttttcctatatatgtattaacatgactgttattttttatgtttatttcatcatttacaaaaaaccagttgcctatcttgccattagctctttgctgtctcccacctttccccaacttcttatcgtctcagctcatgttacaggcactcttggcagagccttctttcctttctgaattggtgactgctgtcatcaaaagaaggtatcgggggcagggtatggtggctgaggcctgcaatcctagcactttgggaggccaaggcaggcagattgcttgaggtcaggagttcaacaccagcctggacaacatggcaaaaccccgatgctactgaaacaaacaaaaaaaattagccaaggatggtggcacacacttgtagtagtcccagctacaactacttgggaggctgaggtgggaggggtcgcctgagcccaggaggtcaaagctgcagtgagctgagatcgcgccactgccctccagcctgggagacagagtgaggaccctgtctcaattaaaaaaaaaaaggttttgggaacctgtctacttttgctatcagcttaaaatcactgtttaccaccttccacctgttagatttttctcttttgtcaggaaagaatcctgtcttccatgttctttagagactttattcctagattttatttcattttatttatttatttatttatttattttgagacagagtcttgctctgtcacccaggctggagtgcagtggtgtaatctcagcttattgcaacctccgccttctgggttcaagcaattctcctgcctctgcctcctgagtagctgggactacaggtgtgtgccaccatgtctggctaccatgttggccaggctggtctcgaattctcgacctcaaggaatccgccttcctcggcttcccaaaagtgctgggattacaggctttagccaccgcgcctgcctagtcctagatcttaaaatgttccaagaatccaggccgggcacagtggcacttgcctgtaatcccagcacattgggaggttgaagtgggagttttgcttgagcccaggagtttgagtctgtggtgagatatgattatgccattgcactccatactccagtctgggtgacagaggaagatcctgtctcaagaaaaagaaaaaaaaagttccaagaatccttgaagaatgtagtcagtgtgtaatccttgattcttggacctgcttcagcaataaatcttaggaaattttaaaaactgttgttttatatatattgttatttgagaatctcgtttttactttagagttgctttaggatataattggaaggatttctaaaagaagacagaactaaaatttaggaagaaaaataaattctatactgaatttattacagaaaaacagcttaccaccttagaaagccacctttgccattatttacctctggcctaaggtagtactttgcctctggtagatgtttagtaaatgtttgaatgaatgaataagtgagtaagtaaataaatgttatcctcttagttcacacttgctactgagtgtgaacttgctactcagttttgtcttcatttcctaactcctcccaaatttctgcaagtaatagtagaggattctaaggtattatttctattgaatggcatattgtaagtcacttaatctttttatttttctgcttatgaaacagttttgagggaagagtatgtggcttacaagatacgacttggccagaaatgtcttttctataacatactgaatgttaacctgacatggcacctgccctgaagctctaagtggcttaatggtcaaagtcttaatttttgaaccattaaaacaacatctgagattctggttacagaaaatctttagcttctttatttcctttcactctcacaaacccaataatcatttgtttcttgaatccaggcactgcgggagttggtattaaaataccgtgaggacatcattaatgtgcggacagcagcagaccacgtagaagaaaagctgaaggctgagatacttttcctaaaagagcagatccaagcagaacagtgtttaaaagaaaatcttgaagaaactctgcaactagaaatagaaaactgcaaggaggaaataggtgaagataaaagtgatgtagtttagaattagagtcactaaataaaactttagtaaaagaagcaatacatggccatggagtctggaacacagaaaagcttaggaaagaatttagtaaggactcagtccattttttgtagatattctgatatattcagattctgaatatatattctgatatagtcaaataatcagaaattctggttatttaaaaaatttttttttttttttttttttttgagacggagtttcattcttgttgcccaggctggagtgcaatggcgcgatcttggctcaccgcaacctctgcctcccaggttcaggcaattctgctgcctcagcctcccgagtagctgggattacaggcatgtgtgccagcacacccagctaattttgtatttttagtagagacgggtttctccatgttggtcaagctggtctcgaactcctgacctcaggtgatctgcctgcctcggccttgcaaatgctgggattacagttgtaagccaacgcgcctggccgaaaactcgtctttttaggagttctgtggcctctttggcaattattcatagataggattctcagtacttgaacccagaaccaggggaacgtgattcaatgggtggcatttccctgcagagatgtgatacatgatctagaggtagtttatgacacagtgtccatttgcatggatcctgcttttccctgagcctaaatatgctgattgcttggtggtaattttgagacagcccccggaacccatgttcagcatacatttgaatcctttggggggtgctctaaaattttaaagaaaaaaatgttcatgcacaataatagatgaatgctaatacatctcatttttttccttctagcttctatttctagcctaaaagctgaattagaaagaataaaagtggaaaaaggacaggtaagtcgtgagtttcaaattaattctatcagcaaccagtggttatttactgactcctactatgctgcacccaacgaataaaaaatagttaaggcatgggccctgccttaaggaacttttgtcttgtgggaagaaaaccacggggtaagggtgtgctggtgatttattgagagtgccctgtgtgtcaggctacgttaaactggaggaggtaaggctaagatgtgactgtggcctggagtttccagtgtagtgagaagataggcaaggcatggtcataacatgttatatgcttagaggtacagtagaaatatgtataaaaaacattacaaacaagagatgacattttctagctggcttagtcctcttagacatcattagttcctttcatagtaaccccattcaacttcctgacctcactgttccttgatttagagattttcacctccaccctgctctccccttccacacactgggctgcattttgcccaactgtgacatctcactgcagccttaagttccttgaccacaatctgccatccttccagctcttccatcggagtacctcattcagacctccagttctctgaacttcccctttcattctggtttcagcagcttcatggcttgctttctttcccctaggttgcatcttactggcctgcctcttcccttcatctcccaccacacctgtccctatggtctttgactccttgtcctgctgctgccctcacctgaccactgcccaaccttggactagtcttgctgtccccagctgctgatgccacgagacttggtgacactgcatgctcaagctgccagatgggcctccagtgttcctcatgcagcctttcatgtgtcctaagttgcgtctcttccattcctcacagtggcagtttcagagtcacctcacctcagccccctcactctcagcagatgctggcctcactcctcaggcatcaggcagggccaccttcagctactgggctcctcaattacaggttttccttttattcccagtcttttctttttcttcagagaatatcatgacctgcttctgaccacagtgtcattgcataggtgctttgactgagtatctccgacttttccagatgtccccgcgcagtgccgggccttgaacttctgcctcttgactgatcttttccattatgcatgaacaggctcaggtgtctcatattcagaaggaaaaagtctgtctttggattgcactcctctcccgagctaccactctttcttcctccctctgttgccacagtcttgatcatcatcactgcctgacttcccaggcatccctccacctgctgcagtctgcctcctgcctccactttgctactgatattgcaccagcagaaattaccagcgctcgaaataacatctcatcctttccattctagctgccactctttgagttcagacttcactctcacctggcttattgtaacagcctaactttccctgcctccaaaatttgtccctaaatcatctccatattgaaatcaaggtgatatttaaacattagaaacttgttcgcgtcccagtctagtggaaagccctcccgtagttccctttattttacaggatcaagtccatatccttagcccagccagagctctcctgcctcacacctctctgcctcagtgcctgtggctcccaacgtgctgtgctgtaggccagccgaacatgccactgttgctgcatgtgtttttagtgcgtgccatccattccctcttattggagtatctctccatcttctccccttgtcacccttgtctttgccctgtaaaaatgtaggagtcaaatgtcatctcctctaggaagtcctttgtaacttttctggcagaattaaatgcttctttcttcatcctttacatgtctgtttaccctgatttctccattttgaggccttagaatatagtaggcacctaataatggttaatgaaagaatagttcaggaagaatacagaggggatccacagagctgaaagggtgagaggagtattcccagtgtagcccgagtgtcttggtgtaattctccaggctctaggctcttttaggtagtgcactggggcccagagggagtttctgtgagtttcagctttttcctttttcacagttggagtccacattaagagagaagtctcaacagcttgagagtcttcaggaaataaagatcagtttggaagagcagttaaagaaagagactgctgctaaggtagtgttttcattagtcatttaattttaaaaagcagggctaagaatgcaggatcacatcttgcttgttgaaaaaaaaatattggtgctttgaagtgtcaccttttaaaaagttggcaaaactgacagcttgtgaaaagaaaaaacttaaacgaattgatctattccagctgggttaaatcttttctgccaggtctggaggcctgcgtcataggctagcttcagatagtaggcagtcagggccattgaccaagcctgggcactgcccagttagaagcactgctttgaaaatgtcattccatttgactgatgtatcaaatcctaagagagattgcatcaaaccaggtttgctgcctaaattttgatgagttccgttagaataaacgtgcatgttgtgggggtagtttcctagaaatggtcttagtgagctgagtggtcagacctgaaagtgcagacagtgttgctgaactgcttgtttttggaaaggctcccacacatcctgctggttttctgtaagagagactggggatagctggggcgtattcactaagtttcctggtggatgcttgactgtggaggttgtcagaggaagtcctgtatgtatccctgttggtgtgacagacaccgatcttagcagctgttttggtgattatcgtcactgtcaccagctgctgggggtgggggagggcagcactttaatccatttcttcctttggcttttcatacccagttcatctcaggacttagagcaagtagtctagatggcctgcacgcttgccctatagataaagagattggtcgtgtataggagtgcgacggatatccacccacctttctgccctagtagtaggtaactacaagttactggatttcctaagtaattcggccctttggcattaatcttcattcaaaacttgtattttttaggctaccgttgaacaactaatgtttgaagagaagaataaagctcagagattacagacagaattagatgtcagtgagcaagtccagagggattttgtaaagctttcacagacccttcaggtgaggcatttggggaaccacatacagagcacgaaggcagttttgggggacagaaccttgccgatccctgacttgaccactggcagtagctagaggtttagagactggctgctcctacctccaccccaaatgtctgactcatcattcaagccagaaacctggtgtgttcttcacacttggcccatttttctttttctgtatgccttgccaattttgcctccttatgagtaaagtactgactccttagcataccatgtaagactcttcccaaccaggcccacccctgtattttgctcatctctctgccttgttttacatgtttaactgcttgtggttcctcgcccacagcgtggtgttctgtctggtaagcatcctcatctcatcccctcctgactcctttctttcaaggctcagcgtaggtctgtcccctctgtggagctcttctaggtccctgagctgggctaaagtgcccctccctctgccatgctccctcgggcactctatgaatgcctgtaatgacacaatgacatttagaatattgtgctaaaactaagtttttttcccaatggaacttcggatttttttttttttttggagacggagtcatgctctgttgcccaggctagagtgcagtggtgtgatcttggctcactgcagcctgtgcctcctggattccagcgattctcctgcctcatcctcctgggtagctgggattacaagtacacaccaccaagcccagctaatttttgtatttttagtagagacagggtttcaccatgttggtcaggctggtctcaaactcctgacctcaggtgatccacctgcctcagcctcccaaattgctgggattacaggcgtgagccaccgtgcccggactggaactgtggattcttcaggattgggagtcaggtctcatttgtctccataatcccaacacattacactttaaaatcctagtctgggccaggcatggtggctcacgcctataatcccagcagtatgggaggctgacatggatggattacctgaggtcaggagtttgagaccagattgaccaacaatatggtgaaaccccgtctctacttaaaatacaaaaattagccgggcatggtggcgtgtgcttataatcccagctacttgggaggctgagacaggagaattgcttgaacccgggaagtggaggttgcagtgagccaagatcatgccactgcactccagcctgggtgacggagcaatactccatctggaggaaaagaaaaagcaagcaagccaggtgtgatggcaggcacctgtaatctcagctactcgggaggctgagacaggagaatcacttgaacccgggaggtggagactacagtgagccgagatcacaccattgcactctggcctgggctggcctggatgatgagcaaaactctcccccccaaaaaaaaatcccagtccgttacacggtagctttggggaattatttttaaaatttttaattgttcttgctgtctccctttgaagtgactagtactctggtgagttaatctgctacatctcagctaaaccagtcaaagttcagaaaatctaggcaggagccacctgtagttatctcaccattgtttctccaggtgcagttagagcggatccggcaagctgactccttggagagaatccgggcaattctgaatgatactaaactgacagacattaaccagcttcctgagacatgacaccctcatggcaggattctagcctgcactttgggtttttaactcatctttagagcaacagtaattattatttaactcttaactgaagaaagagaagtcacaacaaaaggaagactggagaaatgcttacttctagagggagaagactgtgcggcacaggaaacagcaaacagtggggtgatctgcagcccagagaccttcaaatgcgaacactataaactccaggcttgattccaacaggcgtgggatcagatttggtgatggaaaaagcgctgtttccttgcctgctttctccaagacagattttcggaacacatttccctaccctaaagcgacatcccagtagtgtttggaattttctgttcatatagtgtttggaattttctgttcatagatattggaagagagaatttgctttatctgttgtctagagctcatcagtaacagtattcagttagcagacagaagtgtagtatgctgtatgaatattttatattaaaatatgaaggtttgagagcaggccattggctactgactgtatttcccttgctcagtacatttttgttttccttttaccattttatcttatcttgctttggaggaccttaaatgctactgaaacttacctgagaaccataggactgtggcaaacaaaaccaattcatgaagtgaattaatgatgaggatctgaaaacttggctggggctatatatactggaagttgaaggttaaaggaaaagcacaagaaactttggaagcactttttctgcatacttagatgatcttcatgggcccacagggtaccaggataaagccgaactggtaccatctactcttttgaagtgttttagtctagttattggatcagtgaaaaacattagtatacgtttttaaataggctaatttttcaacttggatcattaggcttacgtactacttgtttcaaatgtgtcaaatacaaaaatggtaactaggttgacagatactttgtatttttcttttgaattcagacctggaatgtaagtaagtgacaatgcttatggaaagccagttagttagaattggaaatctgtcttgtcattttacaagcattagattcctttcctgtgtgaagaaagcctcagtgaaacaggtctttgccataactttatgaagtgctacagaaagcacaaagaattgattcatgttcatcaatacctgctgagagtactgtcccaggaatatccagtggatggattcatcatccaggaggttcaaaagtaagatggttttcaaatcatttttgagactggttgcataacagcagggtacctgaaagagccttctgggagttagtgaactaggtagattgttttgttcacataacgccaccatcaacttaaagtgaattgtctttgttataaatgaggtcactatggacttaccctaaagatcttctgtacttctctcttccataggacaaatgataagtactacatacctcatctcttgggttattattgtagtcttgcattcatggttatgaatttaaaaataaataccaattatggaaatagtactaaaggcttgccgcacatgaaacattattttaattggtttaaagtccctttataaagagtgctacatggtttagataaaggaaacatataactattgagttacaggggattttattaattataaaatgcaatcaatttaaattacgtaggtttaagactagtcccttggataagccccaagcgaatttgtcttcagattattaaaattagtgctgtaaatcagggtgggcaattcacagcctttctgaactgactgaactagagcttgcagtgaagtgttctgctgagactgagcaccttacagatatttttctccagaagatggtgctgggtaataaaatcatcacaattagggaatggttagtggtctctactgtggcaaatgccaactgttggaattcactttattgtagaaaaacccaaactgagactcttaagttttgtttagcaatgtgtttctggtatgaaacaaactactgtgtcactgtccaggtaggaaacaattctttcaactgggttttcagcataaatgggaactgatgtagaaggcaggatttagcccttctaggcaaaagaaaagctcagttgggtttcacgagtgttcctgtgcttatattcagtctgtgcctacatgttctcatgcatgtctaacctgatttacctcttacctgtaacctaccttatcatgtggcttttaattgacagtcactcagccatttctaagcagatatagtagtacctttcagaactcacattggcaagtgtaaaaagatgacttaaggtgaagtgaggacaaaatcacattctgcatactaacctatttttttctccctttaaggtgctaaacttgcacctcatgtccactcagtaacaagtattgggacgtagagcacagcctcactcagctctgaaaggtaatacagcttgtgaggaagtgagccagcagtggcctttgcaattgtggatcttgagctctgctctcagcagatttcaggtgtaaccatttgttaactgtactgaaggtgtgtcctcaagaagaaagtgttcaaattaaaaaagctgctgccaagtacactgtgtggtcttctcctttgaatcctagggttctatccctcttcagagtcatgtttctggtgctgctactttaaaacacagctcacaagaataactaacttgctcaaatatggagaaaactcaatagggttcagggaggttctggcagtgtgcagtgtgaaataatcctgagtccttgctgaacacaactgtaggcttgagttataaagcacattccaaattttaaataaaagcatttactcaattattataaaacaacatatttaaaaagatgaaccacaccaaaggtcatcaaaacacctttttataaattagataattctacctgttttacaatatgggtttaagccttcaatggtgttcagttcaggtgtgagtcagctcctggtggtgtcagaagtttacatgattgcggatatcattgatttgcttcaccatttcccttatatgttcacccctgtaaaattgtaaagtcactcacttttggaattataata

SEQ ID NO: 202 - DNA, 3719 bp, Homo sapiens
ggaccagagccggtagcgaggttgggagagacggagcggacctcagcgctgaagcagaagtccccggagctgcggtctccccgccgcggctgagccatgcggctccctgacctgagaccctggacctccctgctgctggtggacgcggctttactgtggctgcttcagggccctctggggactttgcttcctcaagggctgccaggactatggctggaggggaccctgcggctgggagggctgtgggggctgctaaagctaagagggctgctgggatttgtggggacactgctgctcccgctctgtctggccacccccctgactgtctccctgagagccctggtcgcgggggcctcacgtgctcccccagccagagtcgcttcagccccttggagctggctgctggtggggtacggggctgcggggctcagctggtcactgtgggctgttctgagccctcctggagcccaggagaaggagcaggaccaggtgaacaacaaagtcttgatgtggaggctgctgaagctctccaggccggacctgcctctcctcgttgccgccttcttcttccttgtccttgctgttttgggtgagacattaatccctcactattctggtcgtgtgattgacatcctgggaggtgattttgacccccatgcctttgccagtgccatcttcttcatgtgcctcttctcctttggcagctcactgtctgcaggctgccgaggaggctgcttcacctacaccatgtctcgaatcaacttgcggatccgggagcagcttttctcctccctgctgcgccaggacctcggtttcttccaggagactaagacaggggagctgaactcacggctgagctcggataccaccctgatgagtaactggcttcctttaaatgccaatgtgctcttgcgaagcctggtgaaagtggtggggctgtatggcttcatgctcagcatatcgcctcgactcaccctcctttctctgctgcacatgcccttcacaatagcagcggagaaggtgtacaacacccgccatcaggaagtgcttcgggagatccaggatgcagtggccagggcggggcaggtggtgcgggaagccgttggagggctgcagaccgttcgcagttttggggccgaggagcatgaagtctgtcgctataaagaggcccttgaacaatgtcggcagctgtattggcggagagacctggaacgcgccttgtacctgctcataaggagggtgctgcacttgggggtgcagatgctgatgctgagctgtgggctgcagcagatgcaggatggggagctcacccagggcagcctgctttcctttatgatctaccaggagagcgtggggagctatgtgcagaccctggtatacatatatggggatatgctcagcaacgtgggagctgcagagaaggttttctcctacatggaccgacagccaaatctgccttcacctggcacgcttgcccccaccactctgcagggggttgtgaaattccaagacgtctcctttgcatatcccaatcgccctgacaggcctgtgctcaaggggctgacgtttaccctacgtcctggtgaggtgacggcgctggtgggacccaatgggtctgggaagagcacagtggctgccctgctgcagaatctgtaccagcccacagggggacaggtgctgctggatgaaaagcccatctcacagtatgaacactgctacctgcacagccaggtggtttcagttgggcaggagcctgtgctgttctccggttctgtgaggaacaacattgcttatgggctgcagagctgcgaagatgataaggtgatggcggctgcccaggctgcccacgcagatgacttcatccaggaaatggagcatggaatatacacagatgtaggggagaagggaagccagctggctgcgggacagaaacaacgtctggccattgcccgggcccttgtacgagacccgcgggtcctcatcctggatgaggctactagtgccctagatgtgcagtgcgagcaggccctgcaggactggaattcccgtggggatcgcacagtgctggtgattgctcacaggctgcaggcagttcagcgcgcccaccagatcctggtgctccaggagggcaagctgcagaagcttgcccagctccaggagggacaggacctctattcccgcctggttcagcagcggctgatggactgaggccccagggatactgggccctcttctcaggggcgtctccaggacccagagctgttcctgctttgagtttccctagagctgtgcggccagatagctgttcctgagttgcaagcacgatggagatttggacactgtgtgcttttggtggggtggagaggtggggtggggtggggtgtggtggggtgggaggctgtctgtgtccaggaaacttaattccctggtgactagagctttgcctggtgatgaggagtattttgtggcataatacatatattttaaaatattttccttcttacgtgaactgtatacattcatatagaaaatttagacaatataaaaaagtacaaagaagaaaagtaaaagtacccattgtttcacttcctggagataaccatagttgctattttgctgcctgtcccatcagtcgtttatctgttgtttgagatagaaattaaccaaaaatgacataaatattcatgagattgccttcctatatccttccttgttcctaccagtgtctgctattttgaagaagctagggtctggagggacagagaacagttccctgattaacagtattaatagcgacattggtaacagctaccatttatagagttttaatgggagtaggagctatgctaagtgtttttcatgtattatcgtttttaatcattatccccaaccctatgaggttggttattatccccattttacagatgaggaaactgaagctcaaagaggctcaatgactttcccaaggtggtcgtagtggtggagttggagtttgaacacaggcctgaccctagagtccacaccctgacccaatcaattatattgcatcttgggtccataaaccctaatccataatcccatcaagaaaagctctgctgctcttagctctaaataattcagaatctattctcttctctccagtcccgttgttatagtcttcactcatagacttaagatgatcccatcaccagagaggtttctctaccattagcttccctcttccggccattcttcacaaagtcatttttctaaattctgtgtcacatacgatgatggcatttctggaaattccttcaggtgctctcaagccctgctgcagagatccttttcagagcacacactgttccagcccatctgtctcaccctctcctgttgtatccagctccacgacaaactttctgccttccccaacacctttgtgcctttgcatatggtgttttcttgcccattttctgctcgactcgcccctgattttcaagttcaagacttaactcagggttcaggtcttccaggaggccttacttatgtcgtcagtctggggaactctccatgtgcttctatcactgtgcggttacctctttcacagcccttttaaagttctatcttccctttcccaccttttttgaccttccactagaccatgagcacctgggcggaaagccatatatcttattaagctttatatctgctacctggccgagggctaattcatagtggag

SEQ ID NO: 203 - protein, 703 aa, Homo sapiens
MRLPDLRPWTSLLLVDAALLWLLQGPLGTLLPQGLPGLWLEGTLRLGGLWGLLKLRGLLGFVGTLLLPLCLATPLTVSLRALVAGASRAPPARVASAPWSWLLVGYGAAGLSWSLWAVLSPPGAQEKEQDQVNNKVLMWRLLKLSRPDLPLLVAAFFFLVLAVLGETLIPHYSGRVIDILGGDFDPHAFASAIFFMCLFSFGSSLSAGCRGGCFTYTMSRINLRIREQLFSSLLRQDLGFFQETKTGELNSRLSSDTTLMSNWLPLNANVLLRSLVKVVGLYGFMLSISPRLTLLSLLHMPFTIAAEKVYNTRHQEVLREIQDAVARAGQVVREAVGGLQTVRSFGAEEHEVCRYKEALEQCRQLYWRRDLERALYLLIRRVLHLGVQMLMLSCGLQQMQDGELTQGSLLSFMIYQESVGSYVQTLVYIYGDMLSNVGAAEKVFSYMDRQPNLPSPGTLAPTTLQGVVKFQDVSFAYPNRPDRPVLKGLTFTLRPGEVTALVGPNGSGKSTVAALLQNLYQPTGGQVLLDEKPISQYEHCYLHSQVVSVGQEPVLFSGSVRNNIAYGLQSCEDDKVMAAAQAAHADDFIQEMEHGIYTDVGEKGSQLAAGQKQRLAIARALVRDPRVLILDEATSALDVQCEQALQDWNSRGDRTVLVIAHRLQAVQRAHQILVLQEGKLQKLAQLQEGQDLYSRLVQQRLMD

SEQ ID NO: 204 - DNA, 2497 bp, Homo sapiens
gaggttgggagagacggagcggacctcagcgctgaagcagaagtccccggagctgcggtctccccgccgcggctgagccatgcggctccctgacctgagaccctggacctccctgctgctggtggacgcggctttactgtggctgcttcagggccctctggggactttgcttcctcaagggctgccaggactatggctggaggggaccctgcggctgggagggctgtgggggctgctaaagctaagagggctgctgggatttgtggggacactgctgctcccgctctgtctggccacccccctgactgtctccctgagagccctggtcgcgggggcctcacgtgctcccccagccagagtcgcttcagccccttggagctggctgctggtggggtacggggctgcggggctcagctggtcactgtgggctgttctgagccctcctggagcccaggagaaggagcaggaccaggtgaacaacaaagtcttgatgtggaggctgctgaagctctccaggccggacctgcctctcctcgttgccgccttcttcttccttgtccttgctgttttgggtgagacattaatccctcactattctggtcgtgtcattgacatcctgggaggtgattttgacccccatgcctttgccagtgccatcttcttcatgtgcctcttctcctttggcagctcactgtctgcaggctgccgaggaggctgcttcacctacaccatgtctcgaatcaacttgcggatccgggagcagcttttctcctccctgctgcgccaggacctcggtttcttccaggagactaagacaggggagctgaactcacggctgagctcggataccaccctgatgagtaactggcttcctttaaatgccaatgtgctcttgcgaagcctggtgaaagtggtggggctgtatggcttcatgctcagcatatcgcctcgactcaccctcctttctctgctgcacatgcccttcacaatagcagcggagaaggtgtacaacacccgccatcaggaagtgcttcgggagatccaggatgcagtggccagggcggggcaggtggtgcgggaagccgttggagggctgcagaccgttcgcagttttggggccgaggagcatgaagtctgtcgctataaagaggcccttgaacaatgtcggcagctgtattggcggagagacctggaacgcgccttgtacctgctcataaggagggtgctgcacttgggtgtgcagatgctgatgctgagctgtgggctgcagcagatgcaggatggggagctcacccagggcagcctgctttcctttatgatctaccaggagagcgtggggagctatgtgcagaccctggtatacatatatggggatatgctcagcaacgtgggagctgcagagaaggttttctcctacatggaccgacagccaaatctgccttcacctggcacgcttgcccccaccactctgcagggggttgtgaaattccaagacgtctcctttgcatatcccaatcgccctgacaggcctgtgctcaaggggctgacgtttaccctacgtcctggtgaggtgacggcgctggtgggacccaatgggtctgggaagagcacagtggctgccctgctgcagaatctgtaccagcccacagggggacaggtgctgctggatgaaaagcccatctcacagtatgaacactgctacctgcacagccaggtggtttcagttgggcaggagcctgtgctgttctccggttctgtgaggaacaacattgcttatgggctgcagagctgcgaagatgataaggtgatggcggctgcccaggctgcccacgcagatgacttcatccaggaaatggagcatggaatatacacagatgtaggggagaagggaagccagctggctgcgggacagaaacaacgtctggccattgcccgggcccttgtacgagacccgcgggtcctcatcctggatgaggctactagtgccctagatgtgcagtgcgagcaggccaaaaccctttggaagttcatgatattttgaatttcaatggatatttcctgggaataatgagttcaaatgaacgaatatgtggaacaaagcatcaccaacatttattttttcaggatgaggtgatggacaaaaccatcacagggaaattgaggcaaatagtacatgtaaaacaatacttcgggtgagtccacctatcccaaagtcgtatcaaagaagtggctgcagattggagcccaaagcctttggttcctcagtttccaaatggattctcactaggtgggatcatgagtttgctttggacaccccaaattctaactatttcttttgtttcttacatcctttccctcttccccagccccttcccctcatgttacacctcttgctggtttgagacgtcaatcaccactgagaaagaattaaaccagtattttgagctggcaaaattcttagcctagtacaattccttcaattaaactgtagctcaac

SEQ ID NO: 205 - protein, 644 aa, Homo sapiens
RLPDLRPWTSLWLLQGPLGTLLPQGLPGLWLEGTLRLGGLWGLLKLRGLLGFVGTLLLPLCLATPLTVSLRALVAGASRAPPARVASAPWSWLLVGYGAAGLSWSLWAVLSPPGAQEKEQDQVNNKVLMWRLLKLSRPDLPLLVAAFFFLVLAVLGETLIPHYSGRVIDILGGDFDPHAFASAIFFMCLFSFGSSLSAGCRGGCFTYTMSRINLRIREQLFSSLLRQDLGFFQETKTGELNSRLSSDTTLMSNWLPLNANVLLRSLVKVVGLYGFMLSISPRLTLLSLLHMPFTIAAEKVYNTRHQEVLREIQDAVARAGQVVREAVGGLQTVRSFGAEEHEVCRYKEALEQCRQLYWRRDLERALYLLIRRVLHLGVQMLMLSCGLQQMQDGELTQGSLLSFMIYQESVGSYVQTLVYIYGDMLSNVGAAEKVFSYMDRQPNLPSPGTLAPTTLQGVVKFQDVSFAYPNRPDRPVLKGLTFTLRPGEVTALVGPNGSGKSTVAALLQNLYQPTGGQVLLDEKPISQYEHCYLHSQVVSVGQEPVLFSGSVRNNIAYGLQSCEDDKVMAAAQAAHADDFIQEMEHGIYTDVGEKGSQLAAGQKQRLAIARALVRDPRVLILDEATSALDVQCEQAKTLWKFMIF

SEQ ID NO: 206 - DNA, 101 bp, Homo sapiens
attcctgttttccagaccctggtatacatatatggggatatgctcagcaacgtgggagctgcagagaaggttttctcctacatggaccgacagccaaatct

SEQ ID NO: 207 - DNA, 101 bp, Homo sapiens
caggaaatggagcatggaatatacacaggtatcttctacaaattgtaagcttgctccttcagtaaaaaagagaaaatcagacttactcttagtggtgaagg

SEQ ID NO: 208 - DNA, 101 bp, Homo sapiens
gtctttctgaggcactgtgatcaccccttcagctgcaggactggaattcctgtggggatcgcacagtgctggtgattgctcacaggctgcagacagttcag

SEQ ID NO: 209 - DNA, 101 bp, Homo sapiens
ggaattcccgtggggatcgcacagtgctggtgattgctcacaggctgcaggcagttcagcgcgcccaccagatcctggtgctccaggagggcaagctgcag

SEQ ID NO: 210 - DNA, 101 bp, Homo sapiens
accagatcctggtgctccaggagggcaagctgcagaagcttgcccagctccaggagggacaggacctctattcccgcctggtgcagcagcggctgatggac

SEQ ID NO: 211 - DNA, 101 bp, Homo sapiens
tgagttgcaggcacgatggagatttggacactgtgtgcttttggtggggtggagaggtggggtggggtggggtgggggctgtctgtgtccaggaaacttaa

SEQ ID NO: 212 - DNA, 101 bp, Homo sapiens
tggacactgtgtgcttttggtggggtagagaggtggggtggggtggggtgtgggctgtctgtgtccaggaaacttaattccctggtgactagagctttgcc

SEQ ID NO: 213 - DNA, 101 bp, Homo sapiens
tatctgaggaagggaatttctctgatttcctcagatgtaggggagaaggggagccagctggctgcgggacagaaacaacgtctggccattgcccgggccct

SEQ ID NO: 214 - DNA, 101 bp, Homo sapiens
gatgaggctactagtgccctagatgtgcagtgcgagcaggccgtgagtactgtgagagggcaggggacagtggggcctgggaggggcatgctgggaggatc

SEQ ID NO: 215 - DNA, 101 bp, Homo sapiens
cagaagcttgcccagctctaggagggacaggacctctattcccgcctggttcagcagcggctgatggactgaggccccagggatactgggccctcttctca

SEQ ID NO: 216 - DNA, 101 bp, Homo sapiens
ctttgagtttccctagagctgtgcggccagatagctgttcctgagttgcaagcacgatggagatttggacactgtgtgcttttggtggggtagagaggtgg

SEQ ID NO: 217 - DNA, 110 bp, Homo sapiens
acactgtgtgcttttggtggggtagagaggtggggtggggtggggtggggtggggtggaggctgtctgtgtccaggaaacttaattccctggtgactagagctttgcctg

SEQ ID NO: 218 - DNA, 101 bp, Homo sapiens
ggagtattttgtggcataatacatatattttaaaatattttccttcttacgtgaactgtatacattcatatagaaaatttagacaatataaaaaagtacaa

SEQ ID NO: 219 - DNA, 101 bp, Homo sapiens
ccattgtttcacttcctggagataaccatagttgctattttgctgcctgttccatcagtcgtttatctgttgtttgagatagaaattaaccaaaaatgaca

SEQ ID NO: 220 - DNA, 101 bp, Homo sapiens
aaattaaccaaaaatgacataaatattcatgagattgccttcctatatccctccttgttcctaccagtgtctgctattttgaagaagctagggtctggagg

SEQ ID NO: 221 - DNA, 101 bp, Homo sapiens
gctagggtctggagggacagagaacagttccctgattaacagtattaataacgacattggtaacagctaccatttatagagttttaatgggagtaggagct

SEQ ID NO: 222 - DNA, 101 bp, Homo sapiens
ctagggtctggagggacagagaacagttccctgattaacagtattaatagtgacattggtaacagctaccatttatagagttttaatgggagtaggagcta

SEQ ID NO: 223 - DNA, 101 bp, Homo sapiens
cagtattaatagcgacattggtaacagctaccatttatagagttttaatgtgagtaggagctatgctaagtgtttttcatgtattatcgtttttaatcatt

SEQ ID NO: 224 - DNA, 101 bp, Homo sapiens
taggagctatgctaagtgtttttcatgtattatcgtttttaatcattatctccaaccctatgaggttggttattatccccattttacagatgaggaaactg

SEQ ID NO: 225 - DNA, 100 bp, Homo sapiens
aatctattctcttctctccagtcccgttgttatagtcttcactcatagacagcccatctgtctcaccctctcctgttgtatccagctccacgacaaactt

SEQ ID NO: 226 - DNA, 51 bp, Homo sapiens
tctctcttcacctctacctgaaacctgatgctttaaagaccagagttatct

SEQ ID NO: 227 - DNA, 51 bp, Homo sapiens
cccaaatctcataatactgagtttccctggagaaatgtattccacgttcag

SEQ ID NO: 228 - DNA, 866 bp, Homo sapiens
  exon (501)..(689)
tgaggaaaggcagagtgagcatttagatctcttcctacatttaccagttctcaaaaacagctacttcatccagggctttatttaaacattttcctagacacttgataaacatcttttttgtgtagagaactgcgctgggcactctgacggctacaaaggtgagttgggcacagtgcctgcatttaaggagctccccgtctaatcaagcaagacagaactgggcacaagtaataggaagcagtaactgaaaagatctggggctagaggcaatgctgtatggtaggagaatggactgtatatcctttatattgcaaattggaacactggggtattggtgccacttttaaattccatccaaattgtacatttaaaggtggagaatctcttttgagtatggaggaggagcagtgcagttgtgagtggagtgtgtgaggagttgggagggtggtttctggtagaagtgtgtttaattagccggctctcccattcctgttttccagaccctggtatacatatatggggatatgctcagcaaygtgggagctgcagagaaggttttctcctacatggaccgacagccaaatctgccttcacctggcacgcttgcccccaccactctgcagggggttgtgaaattccaagacgtctcctttgcatatcccaatcgccctgacaggcctgtgctcaaggtgcctgaaagagggaggaaacctggacccttgctctctgctgctaatgcataattggacatcacagcctatagttcatttgcctctgagaacctggtcttgcctctgctaagaagagaaatggagggattttgagggagaaggggcaggcccttaactctttttctggttttctag

SEQ ID NO: 229 - DNA, 4286 bp, Homo sapiens
  exon (501)..(689)
  exon (867)..(1040)
  exon (1218)..(1377)
  exon (1771)..(1907)
  exon (2273)..(3785)
tgaggaaaggcagagtgagcatttagatctcttcctacatttaccagttctcaaaaacagctacttcatccagggctttatttaaacattttcctagacacttgataaacatcttttttgtgtagagaactgcgctgggcactctgacggctacaaaggtgagttgggcacagtgcctgcatttaaggagctccccgtctaatcaagcaagacagaactgggcacaagtaataggaagcagtaactgaaaagatctggggctagaggcaatgctgtatggtaggagaatggactgtatatcctttatattgcaaattggaacactggggtattggtgccacttttaaattccatccaaattgtacatttaaaggtggagaatctcttttgagtatggaggaggagcagtgcagttgtgagtggagtgtgtgaggagttgggagggtggtttctggtagaagtgtgtttaattagccggctctcccattcctgttttccagaccctggtatacatatatggggatatgctcagcaatgtgggagctgcagagaaggttttctcctacatggaccgacagccaaatctgccttcacctggcacgcttgcccccaccactctgcagggggttgtgaaattccaagacgtctcctttgcatatcccaatcgccctgacaggcctgtgctcaaggtgcctgaaagagggaggaaacctggacccttgctctctgctgctaatgcataattggacatcacagcctatagttcatttgcctctgagaacctggtcttgcctctgctaagaagagaaatggagggattttgagggagaaggggcaggcccttaactctttttctggttttctaggggctgacgtttaccctacgtcctggtgaggtgacggcgctggtgggacccaatgggtctgggaagagcacagtggctgccctgctgcagaatctgtaccagcccacagggggacaggtgctgctggatgaaaagcccatctcacagtatgaacactgctacctgcacagccaggtgggtgaggagggagaagacaggggacaggagaggggagcatgtacagagagaggatgggagatccacgggaaggcgcaccaggtgttcattctgagggaggtaggtggggaggacaaaagggcccctgccttgggggtttacacatagtcctctgcccctgtccccgctgcacaggtggtttcagttgggcaggagcctgtgctgttctccggttctgtgaggaacaacattgcttatgggctgcagagctgcgaagatgataaggtgatggcggctgcccaggctgcccacgcagatgacttcatccaggaaatggagcatggaatatacacaggtatcttctacaaattgtaagcytgctccttcagtaaaaaagagaaaatcagacttactcttagtggtgaaggtcgtgtccctgtaacttgatgtttgctgttcctctgccctttcctccattcctacgtctccttccccacacactgaattcttcagcctccctcttgctcaagagtctttgtttgcagagagcaatgcagcagtggtgctccctccatgggcagccccgtcaggtccccaccccatggccctcctcccactgggccctccccgcactgggccctcccacctcccgaggtcctactggaagtacctgctgtgcacttgtccctccttgtgtgttgtctgtgtcacttgtatctgaggaagggaatttctctgatttcctcagatgtaggggagaagggragccagctggctgcgggacagaaacaacgtctggccattgcccgggcccttgtacgagacccgcgggtcctcatcctggatgaggctactagtgccctagatgtgcagtgcgagcaggccgtgagtacygtgagagggcaggggacagtggggcctgggaggggcatgctgggaggatcagactgtgcagaattgggcagagggaggacgaaggacctactagtggaaacagtctgtgccttcttggggttggggaatggaatccggtggtgtgagggcagccccagttccctcctgggcttccattcctccagctgtggcagtacagccgggagagaagggcagtccaggcctttatctactgccctttcctaccttcttttatttcacaccttctttaccctaaatcataagagatggtgcccaggtggatgtggtgtccatctcattcctgtctttctgaggcactgtgatcaccccttcagctgcaggactggaattccygtggggatcgcacagtgctggtgattgctcacaggctgcagrcagttcagcgcgcccaccagatcctggtgctccaggagggcaagctgcagaagcttgcccagctcyaggagggacaggacctctattcccgcctggtkcagcagcggctgatggactgaggccccagggatactgggccctcttctcaggggcgtctccaggacccagagctgttcctgctttgagtttccctagagctgtgcggccagatagctgttcctgagttgcargcacgatggagatttggacactgtgtgcttttggtggggtrgagaggtggggtggggtggggtgkggtggggtggaggctgtctgtgtccaggaaacttaattccctggtgactagagctttgcctggtgatgaggagtattttgtggcataatacatatattttaaaatattttccttcttacrtgaactgtatacattcatatagaaaatttagacaatataaaaaagtacaaagaagaaaagtaaaagtacccattgtttcacttcctggagataaccatagttgctattttgctgcctgtyccatcagtcgtttatctgttgtttgagatagaaattaaccaaaaatgacataaatattcatgagattgccttcctatatccytccttgttcctaccagtgtctgctattttgaagaagctagggtctggagggacagagaacagttccctgattaacagtattaatarygacattggtaacagctaccatttatagagttttaatgkgagtaggagctatgctaagtgtttttcatgtattatcgtttttaatcattatcyccaaccctatgaggttggttattatccccattttacagatgaggaaactgaagctcaaagaggctcaatgactttcccaaggtggtcgtagtggtggagttggagtttgaacacaggcctgaccctagagtccacaccctgacccaatcaattatattgcatcttgggtccataaaccctaatccataatcccatcaagaaaagctctgctgctcttagctctaaataattcagaatctattctcttctctccagtcccgttgttatagtcttcactcatagacagcccatctgtctcaccctctcctgttgtatccagctccacgacaaacttctgccttccccaacacctttgtgcctttgcatatggtgttttcttgcccattttctgctcgactcgcccctgattttcaagttcaagacttaactcagggttcaggtcttccaggaggccttacttatgtcgtcagtctggggaactctccatgtgcttctatcactgtgcggttacctctttcacagcccttttaaagttctatcttccctttcccaccttttttgaccttccactagaccatgagcacctgggcggaaagccatatatcttattaagctttatatctgctacctggccgagggcctaattcatagtggagaataaatagtcaattgaataaatgaataaatatctccaccatcgtactaatcttaatcctccctgcccactcccaccactgaaaatgcaacattgtacacatcactggttgttgggagggacttaccttggaaagttgctattctaggaaagagaaaccttcatattcctggaaacagcaggtagtttccagtgctggcaatgaattccccagaactgctgttttggattttttcttgcctggcagctgttgggagcagggtgcagtgaggatggggtgagagtgggcagtttcttgtgcagatttgcctttctttcatcctggggctgacttgcagctccacacccatccatctctcaaatttcacagagggtaaaataggcatttggagagaaagaactctggcctgattcctttctctcccacaaatgtcctttattcataaaacaggaataataattcctgtatctcccaactacatggaagctgcagccctcacag

SEQ ID NO: 230 - DNA, 7200 bp, Homo sapiens
gacgtcatcacgcagggccgagtcggcgcggccacatcctttaaatatggtcttttttgggcgcgcgcgacaatgtgaggagtggggtggagcgtgtgtggtgtgtggctgcggcctgggcaagagccgccgcggaccatgagctgagtaagttctggagggatcctgcctcttggagccttcgcagccaggcagctgtgaactgtgagctagagtgaagcagaaatctaggaagatgagctccaagatggtcataagtgaaccaggactgaattgggatatttcccccaaaaatggccttaagacatttttctctcgagaaaattataaagatcattccatggctccaagtttaaaagaactacgtgttttatccaacagacgtataggagaaaatttgaatgcctcagcaagttctgtagaaaatgagccggcagttagttcagcaactcaagcaaaggaaaaagttaaaaccacaattggaatggttcttcttccaaaaccaagagttccttatcctcgtttctctcgtttctcacagagagagcagaggagttatgtggacttgttggttaaatacgcaaagattcctgcaaattccaaagctgttggaataaataaaaatgactacttgcagtacttggatatgaaaaaacatgtgaacgaagaagttactgagttcctaaagtttttgcagaattctgcaaagaaatgtgcgcaggattataatatgctttctgatgatgcccgtctcttcacagagaaaattttaagagcttgcattgaacaagtgaaaaagtattcagaattctatactctccacgaggtcaccagcttaatgggattcttcccattcagagtagagatgggattaaagttagaaaaaactcttctcgcattgggcagtgtaaaatatgtgaaaacagtatttccctcaatgcctataaagttgcagctgtcaaaggacgatatagctaccattgaaacgtcagaacaaacagctgaagctatgcattatgatattagtaaagatccaaatgcagagaagcttgtttccagatatcaccctcagatagctctaactagtcagtcattatttaccttattaaataatcatggaccaacgtacaaggaacagtgggaaattccagtgtgtattcaagtaatacctgttgcaggttcaaaaccagttaaagtaatatatattaattcaccacttccccaaaagaaaatgactatgagagagagaaatcaaatctttcatgaagttccattaaaatttatgatgtccaaaaacacatctgttccagtctctgcagtctttatggacaaacctgaagagtttatatctgaaatggacatgtcctgtgaagtcaacgagtgccgaaaaattgagagtcttgaaaacttgtatttggattttgatgatgatgtcacagaacttgaaacttttggagtaaccaccaccaaagtatcaaaatcaccaagtccagcaagtacttccacagtacctaacatgacagatgctcctacagcccccaaagcaggaactacaactgtggcaccaagtgcaccagacatttctgctaattctagaagtttatctcagattctgatggaacaattgcaaaaggagaaacagctggtcactggtatggatggtggccctgaggaatgcaaaaataaagatgatcagggatttgaatcatgtgaaaaggtatcaaattctgacaagcctttgatacaagatagtgacttgaaaacatctgatgccttacagttagaaaattctcaggaaattgaaacttctaataaaaatgatatgactatagatatattacatgctgatggtgaaagacctaatgttctagaaaacctagacaactcaaaggaaaagactgttggatcagaagcagcaaaaactgaagatacagttctctgcagcagtgatacagatgaggagtgtttaatcattgatacagaatgtaaaaataatagtgatggaaagacagctgttgtgggttctaacttaagttccagaccagctagtccaaattcttcctcaggacaggcttctgtaggaaaccagactaatactgcttgtagtcctgaagagtcatgtgttttaaaaaaacctatcaaacgagtatataaaaaatttgatccagttggagagattttaaaaatgcaggatgagctcttaaagccaatttccagaaaagtaccagaattgcccttaatgaatttagaaaattctaaacagccttctgtttctgagcaattgtctggtccttcagactcctctagttggccgaaatctggatggccttctgcatttcagaagccaaaaggacgattgccatatgaacttcaggactatgttgaagatacatcggaatacctagctcctcaggaaggaaattttgtttataagttatttagcctgcaagacctgttgttactcgtacgctgcagtgtccagaggatagagacaagaccacgttctaaaaaacggaagaaaatcagaagacaatttccagtttatgtactaccaaaagtagagtatcaagcttgttatggagttgaagctctgactgaaagtgaactttgtcgcttatggactgaaagtttattgcattccaacagctcattttatgttgggcatatcgatgcatttacttcaaaactttttctactggaagaaattacctcagaagaattaaaagaaaagctttcagcactcaagatttccaatttatttaacatcctccaacacattctaaagaaactaagtagcttgcaggagggttcctacttgttatctcatgcagcagaagattcttcactcctgatttataaggcctctgatggaaaagttactaggacagcatacaatttgtataaaacacattgcggccttcctggtgtaccttccagtctctcagttccctgggtcccattagatcccagcctgttattaccatatcatatccatcatggaagaataccttgtacttttccaccgaaatcactggataccacaacacaacaaaagattggtggaacgagaatgcctacacgcagccacaggaatccagtttccatggaaaccaaaagcagttgcttgcctgctcagcaagttgaaactgaaggagtggctccacataaaagaaaaataacttgaggactgtaccatggaaaactaaatttaaaaaaacagttataacagtgtttaatttagataagtttgagggaaaataatcagtaggcaagaggaacatttttcctgtagtagctagagtgccttgaaaaaatgtgttggctatgtgaaggaatatttcaactaaaatggaatggtatgcttttcacccttgaagtttgaggaggatcttgatatgttttaacattatcatggcagggaaatatataaagaagaaaaatatttttacattaaaccttttctaaaaattgtaaatagaaaaataatttggttttttatcaagaacaacacttatcgttatgtattgtgttagttatattgccagtctgttgcgactgactcaaaaagttaaatgttgccactgctgaagatgattatgagcatcgcaaactttgtttctgacccattttgacagtttttatatactcctttaaaatgatgaatgttacaggttaataaagttaatacctttaaaaacttggtgaaattccattacagaagccaaaaataaaaactccctgcctctgaaaagtcagattactgacttcttgtttggcaaccatcagtttgtttaataaaagaaaaaatttggtggtataacatgtttgatgacagatgcctctatctctagattcaagctgagtgttgaaatacactgctgaaagcaaagagataggtatgttttccagaaaaaaagtcagtgtcattgctccagatgacaaggttaatgtggtaaagcataagcttttttttttttttgagatggagtctcgctctgttgcccaggctggagtgcagtggcatgatctcagctcaccacaacatccacctcctggattaaagcgattctcctgcctcatcctcccgagtagctgggactacaggcacctaccaccaggcttggctaatttttttttgtatttttagtagagacagggtgttaccatgttggccgggctggtctcaaactcctgaccttgtgatccgcctgccttggcctcccaaagtgctgggattacaggggtaagccaccgtgcctggccagcataagctatttttatcctcatctatactgattgatttaaattttccgggcctgcagatgaatttggaaaagggcataatcaactgatgttgctgtagcaaatttggacttaagaaactacagacagggccgggcgtggtggctcacacctgtaattccagcacttcgcaaggccgaggcgggagaatcacttgagtccaggggttggagaccagtctgggcaacacagacctcatctctacaaataaaaaagttagccgggtgtggtggggtgtgcctgtagtcccagctactcaaaaggctgaggcagaagaattgcttgagcccaagaagtcaaggctacagtgagttgtgatcgcaccacagaactcagcttgagtatcagagtgtgaccctgtctcaaagaaaaaaaaaaacaggacaggcttgtttaatctttagaacccttacactaaaattttcagaaattatgtatgtcatttgtaaaatataagttttgtaatcctagataattgcttcacattgaaattttttagctattctgtgtaaagaatagctattcttttggcctaatttctgagaaattagaccgaaaaatctcctcaagtattgtaacagttgaaaatacttatattcaactaccaagttttgtttcattttgattttttgttataaaacatttttaagttatttgagaagtaattattagtaaaattgtatcttgataaatcatttcctcatcctgccattcccttttataaaacactgagtttttttattccttaagtcacatatcccagaaatgttttggttgtgaatcatttgccagcgagccaagggagaggcagggattcccttgaaatgtactcttacacttttttattttatttttaatgtacatttgtgtgcaccagaatggaatgtgctctttttaaagagctggacagtggttgcttcagacttctgaataccagaaagacttgccttttaatttttaaatattactttttacatcataaaatgtgttatcttatccatgtatttgaataacatcatatataaaggtagttttttgcttgtgcttagtgaagcctccttttttaacatacatttgatatgctttatgttctttttcttgatttttagtactgagaatttataagccaagaagtaactgacaatatgtttagcaggatgtaatcccagctacttgggaagctgaggtgggaggatcgcttgagtctaggagtttgaggctgcagtgagctatgatggtgccactgcactccatcctgggtgagagatcaagaccctatctcaaaaaatgagcaagttttttttttttttttaaatcagacttagggctagcaaggatgtgatcaccctggcccatttatacctcagcagtgaaggtgtaatttatacacacctctttgaaaacagtttaattcagtaagtgagtgcaactatgtgccatgcactccaaagtaggtccccacagttattctctcatagccttgttttttcagatctcaccatatttatttgtttctttgattttcttttcttatagattacaagctctgcaaggacaggggcatatttgttttgttcaccattaagtaataaacacctaatacagtgcctgtcatgtagttgcttagcagatattagttagatgcatgaatgtgtaggtatcaaagattttttttttcaggagatcacattctagtggaagacactatactgctttatgtgataagtgctttgataaagtaagcaagtcatctaaccagatcttggtagttaaggttttctgagatagaacttgagctgagtcttttaaaaatagtaggatttataagggaaaattaaaggtcttccacaaagaaactaagtgaaactaagcagcctatgaaaaggtgaaagttggagagattataggctatgaacatgggagatgagagagaaaactgcaggatagggacagaaacactgtgctaagacatttgaactttgtcctgtgcaatgtgggaaccagtagtgaaggttaattaactgacatgatcagatatgtatttgaaaagggctcttgttggcattagtctagagaatgcgatggagctgggaagcgaaagaagaaatgttgggagcctgtgttgtagtaactgaaaaatggcaatggcccagaattaaagcagcaagaataggagtgggctcaagtgatgtataaggaaaaaaaaaaaaatgacaactcagttttgttgttggtaaggagagtaaagtatggcttctgggtttctcatttgagatactgagtaaatgatggtgttaacccattgagaaaatagtgtggttagagtgggaagaaagttaatttaaaatgttcatttttttttttagtcatttctacttttggattctaggtttgtgtgctatattggttataaccaatttgctgaataataaattatcccaaaacttagctacttaaaacaacaaacattatctcacagtttctgtaagtcaaaagtccaggtctctcatgaagttgcagtcaggctcttggctagggctgcagtcatctgaaggattagtaagtcgctaagcccacacttaagctccacccttgaagggagaagtttggaaagaatttgtgaacatatttttaaatcacatatgctatgaacaggtttaggggagggagaggaaagaaaactttaacttttcattagcatactgcatctgtagttcctaatgggcatgttgtaaagatgttaagacgttttctatgcattataggtatatagtagtattttgttttgttctgtttttttgtttggtatgtagtagtttttaatcaaaccttaacgtatttgatattaagatttattgagtttcttgttgagatgtagaaataaaggggatccatttc

SEQ ID NO: 231 - protein, 982 aa, Homo sapiens
MSSKMVISEPGLNWDISPKNGLKTFFSRENYKDHSMAPSLKELRVLSNRRIGENLNASASSVENEPAVSSATQAKEKVKTTIGMVLLPKPRVPYPRFSRFSQREQRSYVDLLVKYAKIPANSKAVGINKNDYLQYLDMKKHVNEEVTEFLKFLQNSAKKCAQDYNMLSDDARLFTEKILRACIEQVKKYSEFYTLHEVTSLMGFFPFRVEMGLKLEKTLLALGSVKYVKTVFPSMPIKLQLSKDDIATIETSEQTAEAMHYDISKDPNAEKLVSRYHPQIALTSQSLFTLLNNHGPTYKEQWEIPVCIQVIPVAGSKPVKVIYINSPLPQKKMTMRERNQIFHEVPLKFMMSKNTSVPVSAVFMDKPEEFISEMDMSCEVNECRKIESLENLYLDFDDDVTELETFGVTTTKVSKSPSPASTSTVPNMTDAPTAPKAGTTTVAPSAPDISANSRSLSQILMEQLQKEKQLVTGMDGGPEECKNKDDQGFESCEKVSNSDKPLIQDSDLKTSDALQLENSQEIETSNKNDMTIDILHADGERPNVLENLDNSKEKTVGSEAAKTEDTVLCSSDTDEECLIIDTECKNNSDGKTAVVGSNLSSRPASPNSSSGQASVGNQTNTACSPEESCVLKKPIKRVYKKFDPVGEILKMQDELLKPISRKVPELPLMNLENSKQPSVSEQLSGPSDSSSWPKSGWPSAFQKPKGRLPYELQDYVEDTSEYLAPQEGNFVYKLFSLQDLLLLVRCSVQRIETRPRSKKRKKIRRQFPVYVLPKVEYQACYGVEALTESELCRLWTESLLHSNSSFYVGHIDAFTSKLFLLEEITSEELKEKLSALKISNLFNILQHILKKLSSLQEGSYLLSHAAEDSSLLIYKASDGKVTRTAYNLYKTHCGLPGVPSSLSVPWVPLDPSLLLPYHIHHGRIPCTFPPKSLDTTTQQKIGGTRMPTRSHRNPVSMETKSSCLPAQQVETEGVAPHKRKIT

SEQ ID NO: 232 - DNA, 101 bp, Homo sapiens
ggatagggacattaagagataggtagggtggcttgaaatttttactaataatttaccaatttatttacataagatgtcctgtgaagtcaacgagtgccgaa

SEQ ID NO: 233 - DNA, 101 bp, Homo sapiens
cagcaatttccagtttatgtactaccaaaagtagagtatcaagcttgttacggagttgaagctctgactgaaagtgaactttgtcgcttatggactgaaag

SEQ ID NO: 234 - DNA, 101 bp, Homo sapiens
taacatcctccaacacattctaaagaaactaagtaggtaagtattttttacgcattttgctttgatacatctgattttcttagatgaaaattcttagaaac

SEQ ID NO: 235 - DNA, 101 bp, Homo sapiens
tgtaatcctagataattgcttcacattgaaattttttagctattctgtgttaaagaatagctattcttttggcctaatttctgagaaattagaccgaaaaa

SEQ ID NO: 236 - DNA, 101 bp, Homo sapiens
aataacatcatatataaaggtagttttttgcttgtgcttagtgaagcctcgttttttaacatacatttgatatgctttatgttctttttcttgatttttag

SEQ ID NO: 237 - DNA, 101 bp, Homo sapiens
tccatcctgggtgagagatcaagaccctatctcaaaaaatgagcaagtttgttttttttttttaaatcagacttagggctagcaaggatgtgatcaccctg

SEQ ID NO: 238 - DNA, 100 bp, Homo sapiens
tgttgtaaagatgttaagacgttttctatgcattataggtatatagtagtgttttgttctgtttttttgtttggtatgtagtagtttttaatcaaacctt

SEQ ID NO: 239 - DNA, 2873 bp, Homo sapiens
  exon (501)..(1494)
  exon (2197)..(2372)
agaaagtcactggttgatattaagggtgcaccagaagctggcgacacttctctggacgcattaaaaagcagcgtcctcacagtggcagagggactttcctcctggtcagctaagaccaagtgtctctgcaggagcctatagagtagacataaatgaaaatctgcctcccgtttggccctacatttcttctttgtggtcttgtctattttttgattcgttgaaattcctcttgagatgtggtagtttgtaaatattccatttcttgtgctattataacttggcaaatttgcctgttatcatgaacatatcagtgggaagatgaggttaataatagctggtagtagtttgttgtcatcttaaacaagaaccttttacaaccattagacttttctttctactttaaaagagcaggaagtatgtatgacagggatagggacattaagagataggtagggtggcttgaaatttttactaatamtttaccaatttatttacataagatgtcctgtgaagtcaacgagtgccgaaaaattgagagtcttgaaaacttgtatttggattttgatgatgatgtcacagaacttgaaacttttggagtaaccaccaccaaagtatcaaaatcaccaagtccagcaagtacttccacagtacctaacatgacagatgctcctacagcccccaaagcaggaactacaactgtggcaccaagtgcaccagacatttctgctaattctagaagtttatctcagattctgatggaacaattgcaaaaggagaaacagctggtcactggtatggatggtggccctgaggaatgcaaaaataaagatgatcagggatttgaatcatgtgaaaaggtatcaaattctgacaagcctttgatacaagatagtgacttgaaaacatctgatgccttacagttagaaaattctcaggaaattgaaacttctaataaaaatgatatgactatagatatattacatgctgatggtgaaagacctaatgttctagaaaacctagacaactcaaaggaaaagactgttggatcagaagcagcaaaaactgaagatacagttctctgcagcagtgatacagatgaggagtgtttaatcattgatacagaatgtaaaaataatagtgatggaaagacagctgttgtgggttctaacttaagttccagaccagctagtccaaattcttcctcaggacaggcttctgtaggaaaccagactaatactgcttgtagtcctgaagagtcatgtgttttaaaaaaacctatcaaacgagtatataaaaaatttgatccagttggagagattttaaaaatgcaggatgagctcttaaagccaatttccagaaaagtaccagaattgcccttaatgaatttagaaaattctaaacagccttctgtttctgagcaattgtctggtccttcagactcctctagttggccgaaatctggatggccttctgcatttcagaagccaaaaggacgtaagtaaatatttacaaagagcttacagtgttttacttgttctttttccttaggtttttctccctcgttcctttactttgtcataacctgttttgtaattgtcatatagtcactgatatttcattttttcgatctattgatcagtatttcagcttccaaaataatcctctctagatatgtatacaaaggcgtatgggtcttgcagcttgtgtttatctaacatgtacagtgactgctaagctataggtaatgtgatttgtcaaattggtgaagggtaagtgcatccagaataatcataaacattgattgatttaaaatttatttatacttggtgttggactgcagttttatactttttggttttgtgaaataaatctgctcctcagctctgcctagattaggaataacattactttttaaactttttatttttctcacatggtatgctgtctcacgaatttatactttgcctagagttagtgaaagttaaaaggagaagaaccttaaagctaggatttcagctcttactgcagttccagtaaaagtaaacagaaatggtaatagtgtgagggtcccttaggcagagaagtagaaaattaaagatgatagaagttttaaaatagttaattgaattgttgtatccttgcttatgatgggtaagagctaatgtattttaaaaatgagaaatactatttttaaaggattgccatatgaacttcaggactatgttgaagatacatcggaatacctagctcctcaggaaggaaattttgtttataagttatttagcctgcaagacctgttgttactcgtacgctgcagtgtccagaggatagagacaagaccacgttctaaaaaacggaagaaaatcagaagagtaagttgttatttgcggagttagaatatgatcacataaataatcaatagatacttaacatgccattactgtgaagtttaaattgttgagcactcatagtagtatcttcaggttgagttttgttttttgttttttgtttttactaaaatgctgagatcgattttaataagggaaagtgtttgtatatagtagccataaatgccggtaacattcatgcttggaatatacagattgagcagccctaatccaaaattcaaaatgctccaaagtttgaaaacttttaagctccggcatggtatcacaagtggaaaattccacacatgacctcgtatgatgggtcacaggccaaactccagtcaaaactttgtttcatgtgtaaaagtatataaaatattgtataaaattactctcaggctctatgtatatggtggatatgaaacataaaagggttttgtgtttagacttgagtcctgtccccaagatatctcattatgtatatgt

SEQ ID NO: 240 - DNA, 1131 bp, Homo sapiens
  exon (501)..(630)
ctttcatttgtagaatgaaacgagctgctcagagtatttgagcctaagacaatgtgactcatgctttaaaggagaaaaaaattctaccttttttatcctcttgaaaatgactagtatataaaaaagtcagtgcttcccagcatctggctttgagcctttgggcaactatgtatgataggctttgttgcaaggagtctgctgtcagtcacattccctgaccaaaatcaaaccttgcctatgtggggaggtatgttgattttggtcacaaatgggaatggtgaggagagatctctttcatccatccaccttttggcaccaaacattcttctattcatcaggcctgaatgtatccatcttacagtgtgaatcctgctgtaattgaaaggatgaaataagattacctgaaagcattttgaaagtggcaaagctgtataggcaaatgtatttgctattaatagtaaattaatagagctttgaaaaagtataattttgcattgcagcaatttccagtttatgtactaccaaaagtagagtatcaagcttgttayggagttgaagctctgactgaaagtgaactttgtcgcttatggactgaaagtttattgcattccaacagctcattttatgttggtaagttatacaaaagtctttattctcctttttaattttcttgtaattacatacttgtaaattcaattgtgaatacttctattctgcccttttttactttcgtttttatttatgtatttattagttttagggtctcattctgttgcccaggctggagtatagtcatgtgatcatagctcactgtaacctcaaactcctggcctcaagtgatcctcccactgcagccttccaagtagctggggctgcaggcatgtgctaccatgcccagctaattttttgttttttcttgagatggggtctcattatattgccagactggtcttgaacttctagcctcaagcaatcctcctaccttagcctccaaaagctctggtattacagggatgacctaccatgctgacctattttagaaacacttatttaatagtataatcaaaaatacacatttgttttctagcttcttagagtactgtttaattggttaactatttattgacctat

SEQ ID NO: 241 - DNA, 1052 bp, Homo sapiens
  exon (501)..(551)
gaccccatgcctcatgcctgtaatcccagcactttgggaggccgaggcgggtggatcacctgaggtcaggaattcaagaccagcctggccaacatggtgaaaccctgtctctaccaaaaatacaaaaaaatcagcctggtgtggtggcgcatgcctgtagtcccagctatttgagaggctgaggcaagagaatcacttgaatccgggaggtggaggttgcagcgagcagagattgcgccactgcactcactccagcctgggcaacagagcaggactccatctcaaaaaaaaaaaaaaaaaaaaggaaattttttttaaaaaattaagtaaatatcataatttaatccaaatagaaataagtttcagattttttgtattacattatctcatccgctgtttttgttgttgttattgagggcatttctctgcctgaggagctataattgctaaaagtaagttttttgcagtttaattttacatgaatttcttttgtttatcaggatttccaatttatttaacatcctccaacacattctaaagaaactaagtaggtaagtattttttasgcattttgctttgatacatctgattttcttagatgaaaattcttagaaactttgaaaatgtactgttaggaatagagacaaaataacctagaaatgcaaaaattattatgtcaaatgtaaacatttatattgtaaaaatataaagtaatttagtatctggctttaatgagcttgcaagtacattttcctgtaagtctattattatgttatttttctattgcagctgtaacacattgccactaacttggtggcttgaaacaaaacagattgattctctttttagttctggagttcagaaatccaaaatcagttttaccgggtaaaagtcaaggtgtcagcaggagtggtcctttctggagactaaggaaagaatcatttctttacctttgtcagtttctagtgaccacctgtattcgttgacttgtggctctttcctccattctcagggcatgtcacttggatctctgcgtcgcatcacattgcctt

SEQ ID NO: 242 - DNA, 5146 bp, Homo sapiens
  exon (501)..(4645)
tcatctctttcctcaattttctttccttatcttccctacccttcttattatctttcttgtttgtccatgtaatttcttctccctgtttaccacctctgaccttcttgtatttcctttcgctccctccctattactccttcctttttcttgtccttcagtttaattatttcaaacacatcacacataaggcctgtcattcccttgatttctaatttatcttttcaacctctaataaatttaacacagagaatagtttccccattcactttgctccccatctactcagatctatcaacttctctgatggttatttgaaagtttagtacttaaaaatgtgtcagattaaaacttgtttagaaacagccagctagctggagatgaaaaatatataagagcttatttgcaaggtggttaatacatgtataaatactacagagttgactgtatataggtatgttgtagatacattaagctattctgttctctgcttcatctcttagattggtggaacgagaatgcctacacgcagccacaggaatccagtttccatggaaaccaaaagcagttgcttgcctgctcagcaagttgaaactgaaggagtggctccacataaaagaaaaataacttgaggactgtaccatggaaaactaaatttaaaaaaacagttataacagtgtttaatttagataagtttgagggaaaataatcagtaggcaagaggaacatttttcctgtagtagctagagtgccttgaaaaaatgtgttggctatgtgaaggaatatttcaactaaaatggaatggtatgcttttcacccttgaagtttgaggaggatcttgatatgttttaacattatcatggcagggaaatatataaagaagaaaaatatttttacattaaaccttttctaaaaattgtaaatagaaaaataatttggttttttatcaagaacaacacttatcgttatgtattgtgttagttatattgccagtctgttgcgactgactcaaaaagttaaatgttgccactgctgaagatgattatgagcatcgcaaactttgtttctgacccattttgacagtttttatatactcctttaaaatgatgaatgttacaggttaataaagttaatacctttaaaaacttggtgaaattccattacagaagccaaaaataaaaactccctgcctctgaaaagtcagattactgacttcttgtttggcaaccatcagtttgtttaataaaagaaaaaatttggtggtataacatgtttgatgacagatgcctctatctctagattcaagctgagtgttgaaatacactgctgaaagcaaagagataggtatgttttccagaaaaaaagtcagtgtcattgctccagatgacaaggttaatgtggtaaagcataagcttttttttttttttgagatggagtctcgctctgttgcccaggctggagtgcagtggcatgatctcagctcaccacaacatccacctcctggattaaagcgattctcctgcctcatcctcccgagtagctgggactacaggcacctaccaccaggcttggctaatttttttttgtatttttagtagagacagggtgttaccatgttggccgggctggtctcaaactcctgaccttgtgatccgcctgccttggcctcccaaagtgctgggattacaggggtaagccaccgtgcctggccagcataagctatttttatcctcatctatactgattgatttaaattttccgggcctgcagatgaatttggaaaagggcataatcaactgatgttgctgtagcaaatttggacttaagaaactacagacagggccgggcgtggtggctcacacctgtaattccagcacttcgcaaggccgaggcgggagaatcacttgagtccaggggttggagaccagtctgggcaacacagacctcatctctacaaataaaaaagttagccgggtgtggtggggtgtgcctgtagtcccagctactcaaaaggctgaggcagaagaattgcttgagcccaagaagtcaaggctacagtgagttgtgatcgcaccacagaactcagcttgagtatcagagtgtgaccctgtctcaaagaaaaaaaaaaacaggacaggcttgtttaatctttagaacccttacactaaaattttcagaaattatgtatgtcatttgtaaaatataagttttgtaatcctagataattgcttcacattgaaattttttagctattctgtgttaaagaatagctattcttttggcctaatttctgagaaattagaccgaaaaatctcctcaagtattgtaacagttgaaaatacttatattcaactaccaagttttgtttcattttgattttttgttataaaacatttttaagttatttgagaagtaattattagtaaaattgtatcttgataaatcatttcctcatcctgccattcccttttataaaacactgagtttttttattccttaagtcacatatcccagaaatgttttggttgtgaatcatttgccagcgagccaagggagaggcagggattcccttgaaatgtactcttacacttttttattttatttttaatgtacatttgtgtgcaccagaatggaatgtgctctttttaaagagctggacagtggttgcttcagacttctgaataccagaaagacttgccttttaatttttaaatattactttttacatcataaaatgtgttatcttatccatgtatttgaataacatcatatataaaggtagttttttgcttgtgcttagtgaagcctcsttttttaacatacatttgatatgctttatgttctttttcttgatttttagtactgagaatttataagccaagaagtaactgacaatatgtttagcaggatgtaatcccagctacttgggaagctgaggtgggaggatcgcttgagtctaggagtttgaggctgcagtgagctatgatggtgccactgcactccatcctgggtgagagatcaagaccctatctcaaaaaatgagcaagtttkttttttttttttaaatcagacttagggctagcaaggatgtgatcaccctggcccatttatacctcagcagtgaaggtgtaatttatacacacctctttgaaaacagtttaattcagtaagtgagtgcaactatgtgccatgcactccaaagtaggtccccacagttattctctcatagccttgttttttcagatctcaccatatttatttgtttctttgattttcttttcttatagattacaagctctgcaaggacaggggcatatttgttttgttcaccattaagtaataaacacctaatacagtgcctgtcatgtagttgcttagcagatattagttagatgcatgaatgtgtaggtatcaaagattttttttttcaggagatcacattctagtggaagacactatactgctttatgtgataagtgctttgataaagtaagcaagtcatctaaccagatcttggtagttaaggttttctgagatagaacttgagctgagtcttttaaaaatagtaggatttataagggaaaattaaaggtcttccacaaagaaactaagtgaaactaagcagcctatgaaaaggtgaaagttggagagattataggctatgaacatgggagatgagagagaaaactgcaggatagggacagaaacactgtgctaagacatttgaactttgtcctgtgcaatgtgggaaccagtagtgaaggttaattaactgacatgatcagatatgtatttgaaaagggctcttgttggcattagtctagagaatgcgatggagctgggaagcgaaagaagaaatgttgggagcctgtgttgtagtaactgaaaaatggcaatggcccagaattaaagcagcaagaataggagtgggctcaagtgatgtataaggaaaaaaaaaaaaatgacaactcagttttgttgttggtaaggagagtaaagtatggcttctgggtttctcatttgagatactgagtaaatgatggtgttaacccattgagaaaatagtgtggttagagtgggaagaaagttaatttaaaatgttcatttttttttttagtcatttctacttttggattctaggtttgtgtgctatattggttataaccaatttgctgaataataaattatcccaaaacttagctacttaaaacaacaaacattatctcacagtttctgtaagtcaaaagtccaggtctctcatgaagttgcagtcaggctcttggctagggctgcagtcatctgaaggattagtaagtcgctaagcccacacttaagctccacccttgaagggagaagtttggaaagaatttgtgaacatatttttaaatcacatatgctatgaacaggtttaggggagggagaggaaagaaaactttaacttttcattagcatactgcatctgtagttcctaatgggcatgttgtaaagatgttaagacgttttctatgcattataggtatatagtagtgttttgttctgtttttttgtttggtatgtagtagtttttaatcaaaccttaacgtatttgatattaagatttattgagtttcttgttgagatgtagaaataaaggggatccatttcatttatccatctactgttgccatgtccccttcactcatgtccagtctacttatcaaggtatataatggcagacacatttacaaggcatctatctgggatttggatctgccctgccaggcaaaaattactgaaaagagtcaagaaccagacctgtgtttctaagatggtggatctctagattacttacttcatcaaacagatttaaacagtcaagagtttgccttggcagatgtgtttgctttcaatatatgagctatagcctggttgattctttaagaaagtaggagggaagcctgagtataaatttattgctgttttgaaagtgaagaacccttataaagattctgtgattagtgggttgactttcttcccttttcttcaaaatctgtttcttttgggtgtggggagaaggaatattttctattctccctatcctagattttgcttatttagaaatatacagcactggaggccgggtgcggtggctcacgcctgtaatcccagc

SEQ ID NO: 243 - DNA, 1959 bp, Homo sapiens
tctcacggagacggaccacagcaagcagaggctgggggggggaaagacgaggaaagaggaggaaaacaaaagctgctacttatggaagatacaaaggagtctaacgtgaagacattttgctccaagaatatcctagccatccttggcttctcctctatcatagctgtgatagctttgcttgctgtggggttgacccagaacaaagcattgccagaaaacgttaagtatgggattgtgctggatgcgggttcttctcacacaagtttatacatctataagtggccagcagaaaaggagaatgacacaggcgtggtgcatcaagtagaagaatgcagggttaaaggtcctggaatctcaaaatttgttcagaaagtaaatgaaataggcatttacctgactgattgcatggaaagagctagggaagtgattccaaggtcccagcaccaagagacacccgtttacctgggagccacggcaggcatgcggttgctcaggatggaaagtgaagagttggcagacagggttctggatgtggtggagaggagcctcagcaactacccctttgacttccagggtgccaggatcattactggccaagaggaaggtgcctatggctggattactatcaactatctgctgggcaaattcagtcagaaaacaaggtggttcagcatagtcccatatgaaaccaataatcaggaaacctttggagctttggaccttgggggagcctctacacaagtcacttttgtaccccaaaaccagactatcgagtccccagataatgctctgcaatttcgcctctatggcaaggactacaatgtctacacacatagcttcttgtgctatgggaaggatcaggcactctggcagaaactggccaaggacattcaggttgcaagtaatgaaattctcagggacccatgctttcatcctggatataagaaggtagtgaacgtaagtgacctttacaagaccccctgcaccaagagatttgagatgactcttccattccagcagtttgaaatccagggtattggaaactatcaacaatgccatcaaagcatcctggagctcttcaacaccagttactgcccttactcccagtgtgccttcaatgggattttcttgccaccactccagggggattttggggcattttcagctttttactttgtgatgaagtttttaaacttgacatcagagaaagtctctcaggaaaaggtgactgagatgatgaaaaagttctgtgctcagccttgggaggagataaaaacatcttacgctggagtaaaggagaagtacctgagtgaatactgcttttctggtacctacattctctccctccttctgcaaggctatcatttcacagctgattcctgggagcacatccatttcattggcaagatccagggcagcgacgccggctggactttgggctacatgctgaacctgaccaacatgatcccagctgagcaaccattgtccacacctctctcccactccacctatgtcttcctcatggttctattctccctggtccttttcacagtggccatcataggcttgcttatctttcacaagccttcatatttctggaaagatatggtatagcaaaagcagctgaaatatgctggctggagtgaggaaaaaaatcgtccagggagcattttcctccatcgcagtgttcaaggccatccttccctgtctgccagggccagtcttgacgagtgtgaagcttccttggcttttactgaagcctttcttttggaggtattcaatatcctttgcctcaaggacttcggcagatactgtctctttcatgagtttttcccagctacacctttctcctttgtactttgtgcttgtataggttttaaagacctgacacctttcataatctttgctttataaaagaacaatattgactttgtctagaaaaaaaaaaaaaaaaaaaaa

SEQ ID NO: 244 - protein, 510 aa, Homo sapiens
MEDTKESNVKTFCSKNILAILGFSSIIAVIALLAVGLTQNKALPENVKYGIVLDAGSSHTSLYIYKWPAEKENDTGVVHQVEECRVKGPGISKFVQKVNEIGIYLTDCMERAREVIPRSQHQETPVYLGATAGMRLLRMESEELADRVLDVVERSLSNYPFDFQGARIITGQEEGAYGWITINYLLGKFSQKTRWFSIVPYETNNQETFGALDLGGASTQVTFVPQNQTIESPDNALQFRLYGKDYNVYTHSFLCYGKDQALWQKLAKDIQVASNEILRDPCFHPGYKKVVNVSDLYKTPCTKRFEMTLPFQQFEIQGIGNYQQCHQSILELFNTSYCPYSQCAFNGIFLPPLQGDFGAFSAFYFVMKFLNLTSEKVSQEKVTEMMKKFCAQPWEEIKTSYAGVKEKYLSEYCFSGTYILSLLLQGYHFTADSWEHIHFIGKIQGSDAGWTLGYMLNLTNMIPAEQPLSTPLSHSTYVFLMVLFSLVLFTVAIIGLLIFHKPSYFWKDMV

SEQ ID NO: 245 - DNA, 101 bp, Homo sapiens
gtcaaggtatgttttataatttttttttaaaagattgttatcttctacatcttttcctaggtcctggaatctcaaaatttgttcagaaagtaaatgaaata

SEQ ID NO: 246 - DNA, 101 bp, Homo sapiens
gagttttttttctatgaacctataggggagaaaaaagatcagcagaagtcgttacttttttttttttttttttttttttttgagagagagtctcactccat

SEQ ID NO: 247 - DNA, 1152 bp, Homo sapiens
  exon (501)..(651)
taacaggaagcaactccacctcagaaactttaaggtgctggccaggatcagataactagttagtggcagcttccatctttttagtaaaagccaatttgtctgacgcttaatttttattccaagtgttatctttaggtcttttaggaactagtgtcattaattacagtgttctggaggaaatatcaaaaagcagctaacagagtagctatctataatatccccattaaagtctgagaatgttatgcaattgaatatgaaattgcgccatccagtggcagaattattgaacactgaacagacccaacttaaagtctggaaattaaatcctctcaaggctaggtccagtgaattaccctctaagtacaataacctaatgtatagtacatcaggaaattgttttcttgtatttttttcaaaacaccatattttgatctactattgtcaaggtatgttttataatttttttttaaaagattgttatcttctacatyttttcctaggtcctggaatctcaaaatttgttcagaaagtaaatgaaataggcatttacctgactgattgcatggaaagagctagggaagtgattccaaggtcccagcaccaagagacacccgtttacctgggagccacggcaggcatgcggttgctcaggtatagcagcatgtagggaccaagagtatctgggagttaggcttggcagtgaaagagcctctgaagttatgggaaagggccacactccctaataccccaagttctacacacccaagtccatacttaagaaaggatattttagtaagtgaataaaatgttcaaactcttagtatatataggggtaggattttatgtatgttaaaaaaaaaagcccccttgtgcatctccctatgggggattcaaaggggaaggggcacagggagagaaagactgggcccgtatactctggggtttggggctacagatttaactattcaatatctgggaggaagaggataagaggagactcatagacatcccaggtcataaatattcacaactagcacatctttatatcacttgatacctgtgtgaattatttgttcacttgttcattcattcagcatatagtgcctgctctatccagaatatgaaaactcaaccctcaaggaaatcagtttc

SEQ ID NO: 248 - DNA, 5383 bp, Homo sapiens
  exon (501)..(4882)
cctttaattccagcagtttattttgtttgaaagattatacctatgtcaaatttaggactgacacacgaggtagtcatgatgtatgtgtgtgtatatactttttttttaagagacatggtctcacgctgtcacccaggctggagtgcagtggtatgatcacagctcactgaagcctcaaactcctgggattaaatgatcctccccacccaggctcccaaatagctgagactacagacatgttccaccgtgcccagctaattttattttttagagagacagggtctcactatgttgcccaggctagtctcaaactcctggcctcaagtgatcctccctccttggcctcccaaagtgctgagattacaggcatgagccactgtgcccagccagtgatttatattgtttgaactcttccaatgcatgatccaataattctaagccctaggtgataactcttctaactcctccaaccacaaacagactttccccactgtttgcagatccagggcagcgacgccggctggactttgggctacatgctgaacctgaccaacatgatcccagctgagcaaccattgtccacacctctctcccactccacctatgtcttcctcatggttctattctccctggtccttttcacagtggccatcataggcttgcttatctttcacaagccttcatatttctggaaagatatggtatagcaaaagcagctgaaatatgctggctggagtgaggaaaaaaatcgtccagggagcattttcctccatcgcagtgttcaaggccatccttccctgtctgccagggccagtcttgacgagtgtgaagcttccttggcttttactgaagcctttcttttggaggtattcaatatcctttgcctcaaggacttcggcagatactgtctctttcatgagtttttcccagctacacctttctcctttgtactttgtgcttgtataggttttaaagacctgacacctttcataatctttgctttataaaagaacaatattgactttgtctagaagaactgagagtcttgagtcctgtgataggaggctgagctggctgaaagaagaatctcaggaactggttcagttgtactctttaagaacccctttctctctcctgtttgccatccattaagaaagccatatgatgcctttggagaaggcagacacacattccattcccagcctgctctgtgggtaggagaattttctacagtaggcaaatatgtgctaaagccaaagagttttataaggaaatatatgtgctcatgcagtcaatacagttctcaatcccacccaaagcaggtatgtcaataaatcacatattcctaggtgatacccaaatgctacagagtggaacactcagacctgagatttgcaaaaagcagatgtaaatatatgcattcaaacatcagggcttactatgaggtaggtggtatatacatgtcacaaataaaaatacagttacaactcagggtcacaaaaaatgcatcttccaatgcatatttttattatggtaaaatatacataaatataattcaccattttaacatttaattcatattaaatacgtacaaatcagtgacatttagtacattcacagtgttgtgccaccatcaccactatttagttccagaacatttgcatcatcaatacattgtctagagacaagactatcctgggtaggcagaaaccatagatcttttgtgtttacagctatggaaaccaactgtaccataaagatagttcactgagttttaaagccaagccacatcttatttttccaaggtttaatttagtgagagggcagcattagtgtggagtggcatgcttttgccctatcgtggaatttacacatcagaatgtgcaggatccaagtctgaaagtgttgccacccgtcacacaacatgggctttgtttgcttattccatgaagcagcagctatagaccttaccatggaaacatgaagagaccctgcacccctttccttaaggattgctgcaagagttacctgttgagcaggattgactggtgatgtttcattctgaccttgtcccaagctctccatctctagatctggggactgactgttgagctgatggggaaagaaaagctctcacacaaaccggaagccaaatgtcccctatctcttgaatgatcaagtcacttttgacaacatccaggtgaatataaaaacttaataaagctgtggaaaggaactcttaatcttcttttctgctacttaggttaaattcactagatcttgattaggaatcaaaattcgaattgggacatgttcaaattctttcttgtggtagttgcctatactgtcatcgctgctgttggttgagcatttgtggtgtaccacgctgtgtgctcaagggtattacattcatcttctcatttaatcctcacaacaatctgaagaaggtaggtattacaattcccacttcatagaaacagaaactgaggttcagagaggttaagtcatttgcccaaatggctgagccaaagcctaccatgtacctaacctttattttctttcccgaacataccaggctgtctcctcataacttccaagcatgcacttaaaactccacatgaatacaaggttcatgggacttggtattcatagaaagggaggcagaaagctggtctgttcctgataggcttgtaatttaatatcattctgttcatgtgctttggatggaagcacatctggcatatgatgctaatcagtggttcccatacccctggcttcctaattttaatgtttgctcacagcatagtagattgacatcaaatagtggccgatgatgatgaaaataaaggtcaaataagttgagccaataacagccgcttttttccttctgtctgcgtatacaaagcactgtcatgcacacaatctattctgaccctcacaacaacccataagggtgtaaatagtatttccattttacaaatgaggatcacacaaactactacatggcagagcagatactccaactcatgtcttctggttgaagcctattgctttttcttttctaaacactttccctcagcaagttggaattagacttcacaagtctccttcagagaacacaaatcttttcttattccattcctgtttggttgcctacgtccaatctccccctccccagagatgccaaaaaaaaaatcctttaaggtatttgggagccaaactcaacttgttaaaatctcaaattatggagacaatcagcagacacaacctaaccccaattattttggcaggaaggttggtttagaggcagatccagcaatctgctttgggccactctgggtggggtaggtgaaataagattggtcactgttaactaattttaatattggattggccattggttatcactgattaccattctcccctggattttcacccaggactcaaaacttggttctgctaaccctgttcctttatgaggaaccttttaaagattcctttataaggtgggagttttttttctatgaacctataggggagaaaaaagatcagcagaagtcrttacttttttttttttttttttttttttttgagagagagtctcactccattgcccaggctggagtgcagtggtgctatctcggctcactgcaacctccgcctcctgggttcaagcaattctcctgcctcagcctcccgagtagctgggattgcaggtgcccaccaccacacccggctaatttttgtatttttagtaaagacagggtttcaccatgttggccaggctggtctccaactcccaatctcaggtgatcctattgcctcgggctcccaaagtgctgggattacaggagtgagccaccatgcctggccagaagtggttacttctgtagacaaaagaataatgctacttaatcaggctttctgtgtgacaagaaagagaaagaaaataaagaagtttcaattcatccaattcttaataagaaatatgtaaataaaattttttaaaattacacttcattttaatgttgtatcagtcaaggtccctgcaagagatggatggtatggtacactcaaactgggtaacacaggagagttttcagaaagcaactaaatccaaaatactatcaaggaatcaatataaaaattgttaatatttttctcatactaaattttcaaaatattttgtgtctattacatttacagcacatcttaattaggactagctgtgtgttcacctcacatgtggcttgtagctaccatactggacagcacatgtccaaaaaaatacacgtaaagttaaagtttaaaagacacaggaactaagccctcattgtctttcccttgggaggtagtttaaagagctatagatgctgtaacattcttgctattatttattatatatgacattattcctaaaaaagcttttgagatcctaggttgtattcctcaggttttgttgccttcccatgaagatgtgaaggcagggatgcctgttattcagtccaagatgcatgacaagagaccttgggaaagtttcatctggatttaaagattaattcttgatgcttacattccatactcaaaatgtaaatttgaatattaaaataaagatgattttttttttggagctagtcttgctctgttgcccaggctggaatgcagtggcatgatcatggctcactgcagcctcgacctcccaagctcaagcaaggctacaggtgtgcacctaagtagctaggactacaggtgtgcaccaccatgtctagctatttttttttctgtagagacagggttttcctatgttgtccaggctggtctcgaactcctgccctcaagcaatcctcctgccttggcctcccaaagtgttgagattacaggcgtaagccactgcacctggccaagatgaatattttaatagctcacagaacaaagtttgccacataatgataaaattactatgaaaatatattccctttattgtcagtttaaaagatgaactgagtttcacccaaactggtctggcccctctctgattcaaataccaatagttgctctgattcaaattccaactgttagaacatgacagctgctcataactagctttgcttactaaccatgtttctttccatttgtattaggtcctttactttttataacagcctcaaagtttcatgaattgctgcagtaaacattgattttcatgtttgtgagtctgcaagccagctgggcagctctacttcaggtggtaagggtggatcagacctattccatatacctcttgttctccttgtccagtggtttctagggatatgttctcatgatgaaccccgcagaggctcgtgaaagtgagaggaaactaggatgcctcttaaggtcttgg

SEQ ID NO: 249 - DNA, 1578 bp, Homo sapiens
gcgacgcgccgaggtactaggcagagccgtggaaccgccgccaggtcgctgttggtccacgccgcccgtcgcgccgcccgcccgctcagcgtccgccgccgccatgggagtgcaggtggaaaccatctccccaggagacgggcgcaccttccccaagcgcggccagacctgcgtggtgcactacaccgggatgcttgaagatggaaagaaatttgattcctcccgggacagaaacaagccctttaagtttatgctaggcaagcaggaggtgatccgaggctgggaagaaggggttgcccagatgagtgtgggtcagagagccaaactgactatatctccagattatgcctatggtgccactgggcacccaggcatcatcccaccacatgccactctcgtcttcgatgtggagcttctaaaactggaatgacaggaatggcctcctcccttagctccctgttcttggatctgccatggagggatctggtgcctccagacatgtgcacatgagtccatatggagcttttcctgatgttccactccactttgtatagacatctgccctgactgaatgtgttctgtcactcagctttgcttccgacacctctgtttcctcttcccctttctcctcgtatgtgtgtttacctaaactatatgccataaacctcaagttattcattttattttgttttcattttggggtgaagattcagtttcagtcttttggatataggtttccaattaagtacatggtcaagtattaacagcacaagtggtaggttaacattagaataggaattggtgttggggggggggtttgcaagaatattttattttaattttttggatgaaatttttatctattatatattaaacattcttgctgctgcgctgcaaagccatagcagatttgaggcgctgttgaggactgaattactctccaagttgagagatgtctttgggttaaattaaaagccctacctaaaactgaggtggggatggggagagcctttgcctccaccattcccacccaccctccccttaaaccctctgcctttgaaagtagatcatgttcactgcaatgctggacactacaggtatctgtccctgggccagcagggacctctgaagccttctttgtggccttttttttttttcatcctgtggtttttctaatggactttcaggaattttgtaatctcataactttccaagctccaccacttcctaaatcttaagaactttaattgacagtttcaattgaaggtgctgtttgtagacttaacacccagtgaaagcccagccatcatgacaaatccttgaatgttctcttaagaaaatgatgctggtcatcgcagcttcagcatctcctgttttttgatgcttggctccctctgctgatctcagtttcctggcttttcctccctcagccccttctcacccctttgctgtcctgtgtagtgatttggtgagaaatcgttgctgcacccttcccccagcaccatttatgagtctcaagttttattattgcaataaaagtgctttatgccggcttttctcaaaaaaaaaaaaaaaaaa

SEQ ID NO: 250 - protein, 108 aa, Homo sapiens
MGVQVETISPGDGRTFPKRGQTCVVHYTGMLEDGKKFDSSRDRNKPFKFMLGKQEVIRGWEEGVAQMSVGQRAKLTISPDYAYGATGHPGIIPPHATLVFDVELLKLE

SEQ ID NO: 251 - DNA, 101 bp, Homo sapiens
acactgagttgctggaaactcacagattttctgtccccaacagatctgccgtggagggatctggtgcctccagacatgtgcacatgaatccatatggagct

SEQ ID NO: 252 - DNA, 2096 bp, Homo sapiens
  exon (501)..(1595)
tatactcaacattatgaatgaccagtttattctcagtctggactgcacatgagagtcacctgggaaatttttaagactttcctgatgcccaggtcaaaccctaaaccagttaatcataatcatgggagtggaacccaggcattaagagttttttaaagcccccaggtgatgcctatatgtagcacagtttgagacccaatgatagtggggaactgtattgtcagcagcatgggtggctagccctcctgctgtcctcagcaaggcaaacttaaccttagattaaacaaaacacacagatcaatttaaggagaaagtttgtttcacctgggacccagcccaagtctttctggctgtctccagctggaacagaagtggcttggtctcagactgctcagctgttggggaagggatttggcgtggcagatggcatcgtggctgtcgccactgcacacaaagaacactgagttgctggaaactcacagattttctgtccccaacagatctgccrtggagggatctggtgcctccagacatgtgcacatgaatccatatggagcttttcctgatgttccactccactttgtatagacatctgccctgactgaatgtgttctgtcactcagctttgcttccgacacctctgtttcctcttcccctttctcctcgtatgtgtgtttacctaaactatatgccataaacctcaagttattcattttattttgttttcattttggggtgaagattcagtttcagtcttttggatataggtttccaattaagtacatggtcaagtattaacagcacaagtggtaggttaacattagaataggaattggtgttggggggggggtttgcaagaatattttattttaattttttggatgaaatttttatctattatatattaaacattcttgctgctgcgctgcaaagccatagcagatttgaggcgctgttgaggactgaattactctccaagttgagagatgtctttgggttaaattaaaagccctacctaaaactgaggtggggatggggagagcctttgcctccaccattcccacccaccctccccttaaaccctctgcctttgaaagtagatcatgttcactgcaatgctggacactacaggtatctgtccctgggccagcagggacctctgaagccttctttgtggccttttttttttttcatcctgtggtttttctaatggactttcaggaattttgtaatctcataactttccaagctccaccacttcctaaatcttaagaactttaattgacagtttcaattgaaggtgctgtttgtagacttaacacccagtgaaagcccagccatcatgacaaatccttgaatgttctcttaagaaaatgatgctggtcatcgcagcttcagcatctcctgttttttgatgcttggctccctctgctgatctcagtttcctggcttttcctccctcagccccttctcacccctttgctgtcctgtgtagtgatttggtgagaaatcgttgctgcacccttcccccagcaccatttatgagtctcaagttttattattgcaataaaagtgctttatgccggcttttctcagctctgtgtcatggtggttattttcaggtgcctcccctgccatttggtgcagggggatggggttgggcagggtgaaggagggtggcagtggggatgcagtttcaagattgtgtcttggcagaagaatgcagcagtgaacatccttcctcactggctattaacgggttgggggtcagaggagggggaatgtggggtaggtttgcatcaaaggagctgcctgaaagggcaagctgggatagtcagggaacatcccctcccctgttaccaaatgtttattaaatatgtgttctgggtagagcactatgctcggggttcttgggttacagaaaagtgggagatacaacacatttttgagaagtgagtcacagtccacttggagatgtgctacaagcaactgcaagcaaattaatgagatacgaagagaagactctgattttaaattggtattcctcagtaacatttaatgtagaaagacagtcctgtggagaggctgcgtggttg

SEQ ID NO: 253 - DNA, 2030 bp, Homo sapiens
ggcggagaggcctggcgcacagggcgagggcggctgcggcgcagtctgcagcatggcgtacccggggcatcctggcgccggcggcgggtactacccaggcgggtatggaggggctcccggagggcctgcgtttcccggacaaactcaggatccgctgtatggttactttgctgctgtagctggacaggatgggcagatagatgctgatgaattgcagagatgtctgacacagtctggcattgctggaggatacaaaccttttaacctggagacttgccggcttatggtttcaatgctggatagagatatgtctggcacaatgggtttcaatgaatttaaagaactctgggctgtactgaatggctggagacaacactttatcagttttgacactgacaggagtggaacagtagacccacaagaattgcagaaggccctgacaacaatgggatttaggttgagtccccaggctgtgaattcaattgcaaaacgatacagcaccaatggaaagatcaccttcgacgactacatcgcctgctgcgtcaaactgagggctcttacagacagctttcgaagacgggatactgctcagcaaggtgttgtgaatttcccatatgatgatttcattcaatgtgtcatgagtgtttaaatcaagaggaagctgcatgaatgtaatcaacattccaactggagctctcctttgcttgtcctctttgccttcggtaatatgtataaacttacatcacgactttctcttaacagctgttgtaaagtttattactttatgtacaactgaagttttgttttagttttgataataaattctttggaactttaataagatctagtctgttacaccatttagaactttcctgagccattatcagtcatgccttattttcttgctaaaactctatgtaaatttaagtatgcaaaatgtttaagtcacattatttatttttcattgtgagacactaaaaactgttaatcagactacagctgttatctttcctctcctacaaagaatactccacacataaaaacttaggtaaatgacatagacgcacttgggtgaaataaaacaacaaaaaaggtaatccagtaatccacgtcaggattcaccttagaagtttagcacacgcccttcaaaacctgttgaataatttgattggcaaatactatctgtcaccaagtccctttttgtcatctatttaaacctttgttaactctccttaaaaatcttgtacattataagcttaactatataaaaagaaaattgatagaaaaagactaagggaatatatggaaatattaacaatgtttattttggatgaatggaattctagatgactttaattttctttatatcagtatttttcagattttctatatgctttccttttaaaatcagattttagtttttaaaatactgatacatccattttgatataccatgtattcacactttaaaaaatacacatagcagagtatcggaaagtatgtaccaaaacattgatctggctaccactgggagtcaggatcatgagttcatcttcttccttcttactgcttttccaaacattctccagtaagcaggtactacatttataatggaaggaattttttaaaaaattttaagctgtacactttcaagtaagatctgaattctaatgctggcttgtgcctcttactatgtggtttggtcattatagataatgcccagtttcagtttccccatctttgaaaaggagataatatgttatctcttgggagtagttctgaatatgaagtgtgttgatacaagaagcactgacaatgtttctgtttcttaaatttaaaactggcctggtttgccttttttatcaagagagcttaacagataaaaaatgaaattagtctattttctacttgccagcagagtatctgtcttattttaggatgcagtgtgaaacttaccattcaactgaacaactagttgtcaactaatgaaaataaaacattttctctaagaaaaaaaaaaaaaaaaaaaa

SEQ ID NO: 254 - protein, 198 aa, Homo sapiens
MAYPGHPGAGGGYYPGGYGGAPGGPAFPGQTQDPLYGYFAAVAGQDGQIDADELQRCLTQSGIAGGYKPFNLETCRLMVSMLDRDMSGTMGFNEFKELWAVLNGWRQHFISFDTDRSGTVDPQELQKALTTMGFRLSPQAVNSIAKRYSTNGKITFDDYIACCVKLRALTDSFRRRDTAQQGVVNFPYDDFIQCVMSV

SEQ ID NO: 255 - DNA, 101 bp, Homo sapiens
tttaagtatgcaaaatgtttaagtcacattatttatttttcattgtgagatactaaaaactgttaatcagactacagctgttatctttcctctcctacaaa

SEQ ID NO: 256 - DNA, 2389 bp, Homo sapiens
  exon (501)..(1888)
ctgttctgtttctgtgcatacatacacttgcatgctacaatttgttttaataaagcagattttaaggcaataaactgtttaaggtgttccattagagtaatggggtaatactgtgtggtttggaaatccccacgtaatacaacagtataaactccagttgtttgtgtttgtggtaagtgtctttgaccacggccatttctagtcttggatattatttggaatttaaataattattcaaataattatttaaattatttatccattgaagttatatctgctttctctaagaagttttgatgtgagaaaccctgtggattttatattagactgcttccctaaaaaaaggaaacttttccatctatcatttactcatatcttagaaagttgtaggggttgttttacccgtgttcaaattagaaaaccaaatgtaagctgccagaaataggctgtgccgtataagtgctttgaggtctgtcatataatgctgatttttctttcagttcattcaatgtgtcatgagtgtttaaatcaagaggaagctgcatgaatgtaatcaacattccaactggagctctcctttgcttgtcctctttgccttcggtaatatgtataaacttacatcacgactttctcttaacagctgttgtaaagtttattactttatgtacaactgaagttttgttttagttttgataataaattctttggaactttaataagatctagtctgttacaccatttagaactttcctgagccattatcagtcatgccttattttcttgctaaaactctatgtaaatttaagtatgcaaaatgtttaagtcacattatttatttttcattgtgagayactaaaaactgttaatcagactacagctgttatctttcctctcctacaaagaatactccacacataaaaacttaggtaaatgacatagacgcacttgggtgaaataaaacaacaaaaaaggtaatccagtaatccacgtcaggattcaccttagaagtttagcacacgcccttcaaaacctgttgaataatttgattggcaaatactatctgtcaccaagtccctttttgtcatctatttaaacctttgttaactctccttaaaaatcttgtacattataagcttaactatataaaaagaaaattgatagaaaaagactaagggaatatatggaaatattaacaatgtttattttggatgaatggaattctagatgactttaattttctttatatcagtatttttcagattttctatatgctttccttttaaaatcagattttagtttttaaaatactgatacatccattttgatataccatgtattcacactttaaaaaatacacatagcagagtatcggaaagtatgtaccaaaacattgatctggctaccactgggagtcaggatcatgagttcatcttcttccttcttactgcttttccaaacattctccagtaagcaggtactacatttataatggaaggaattttttaaaaaattttaagctgtacactttcaagtaagatctgaattctaatgctggcttgtgcctcttactatgtggtttggtcattatagataatgcccagtttcagtttccccatctttgaaaaggagataatatgttatctcttgggagtagttctgaatatgaagtgtgttgatacaagaagcactgacaatgtttctgtttcttaaatttaaaactggcctggtttgccttttttatcaagagagcttaacagataaaaaatgaaattagtctattttctacttgccagcagagtatctgtcttattttaggatgcagtgtgaaacttaccattcaactgaacaactagttgtcaactaatgaaaataaaacattttctctaagcatctttagcctcatttcactattaattttttaaaatattgttaaaatatatattattcaaacctaacatataactatggcaagttagttagcccaggttacatatcagaatgtgaagcagcctgctatatattacacagtgactatagattgcatcatctccgtatattgtctgtgaggccataaagctctgcttgagtctgggctatctagaaaagggccaaaaaggggctcagaggattaggaggcagggagctcaccttcagtgtcctagcacctgctgtttggtttcaactcaccagggtcctctgaggaaatcatagtttaaggaaatggtaatttcctggttgaggataagcagtagagaaggcccttgctgaaggatatgggccatatttgaacaagtcccaaggtgtgctgcatcagttgtggttctgaattggctttggggtgaatacaaaagcatccctctgacattatattagtttgttcgcacactgc

SEQ ID NO: 257 - DNA, 4767 bp, Homo sapiens
atgggcactgacaacagtgcacccagccccccaggagaaaagagatggacacgattaaatataggaaaaatcaaattaccgaaaaaggttagacgtcccggccgtcggttgccgcctacactgtctgccgtcgcgtcgcagttactaaggcgtggggaagatagcggcaggcaccgcagtggagcggctccgagatccccggggggctcgcaggcgcgcatccctcctgactgggacgtcgcctccgcagacccctcggaggctgaagcgacgccggaggcaggccaaggacactggttagtggttcagaaaggtaacctcaagaagaagcccaagggtttggttggagcacaagctgaacgtcgggaaagcctgaaggcgacttcttttgagttcaaggggaagaaagagtctcggcgggaaaatcaggtggaccttcctggacatatcctggaccaggcttttctgctgaagcaccactgtgtgaggaagccatcagatctgtgcaccattaatgtgagtggcctgaagttctccaaggccaaggaaaatgacttcaagcattttcattctgtgatttatatcaatgcctcagaaaacctgctgcctctagaggcatttcacacgtttccagccctaaaggaactggatctcgcatttaatggcatcaaaactatctacgtgaaatatggagactttaagttattagaattcttggacctttccttcaacagcctgactgtggaggccatctgtgatttggggattctgccacacctccgtgtcctgctcctcacaggcaatggccttacctccctgccgcccaatttggccgtcgcagaacaggaggcatctgtaacatcgctgacaagcaagaggtacatcctgaggttcccagcgctggagacactgatgctggatgacaacagactctccaaccccagttgctttgccagcctggctgggctcaggagactgaagaagttaagcttggatgaaaacaggattatcaggatcccatacctacagcaagttcagctctatgacgagtcagtagactggaatggaggcaggggaagtccccataaagagccccaattcatgctgcagtccaagccaaggatgcttgaggactcagatgagcaactggattatactgtactgcccatgaaaaaggatgttgaccggacagaggttgtgttttcatcttaccctggattttcaacctcagagatcgcaaaagaggatgctgtcctaccagtagctctcttcccatctctctgcgagttcgtctttcataacaaccctctggtggcccatacacgaggggtccctccactgctgaagagcttcctccaggagcgactgggaatccacttaattcgaaggaagatagtaaagcctaagcatcatgttttgatgtctcggaaggaatcatggaaggtgaaaagcgaaatcccaaaggtgccgaagcagcctctggtgctccatcacccgcgcatgacgacaaccaagtctccctcaaaggatatgctagagccagaggcagagctggctgaagatctgcccactaccaaaagcacttctgtggagtcagagatgcccactgagaacctggaaggccattccccgtcttgccggaccttcgtgccactgcctcccatctgctccaactccactgtgcatagtgaagagaccctgtcccacctgagtgacacaactgtccgcctcagcccagagcgcccatcagatgaggactccaagagcacagagtccatcttcctgacccaggtgagtgaactgccttcctccgtcatccataaggatgatttagagttaaaggagaaagaccaaaagaaaccaccaacggcacccagagaggtgaaagggactcggaggaaactcccaactgccttccttcccagcaagtaccacggctatgaagaactgctgacagccaagcctgatccagccttcattgagccaaagggaatccagaagaatgcacaagccctgcaacaaatgctgaagcacccactcctgtgccactcctccaagcccaagctggacactcttcagaaaccctatgttcacaaagagaaacgggcccagagaatcccgattccacccccaaagaagactagagcccaacttctggatgacatcttcattcgcttgcgggatccccggaacattacagaggctccactaggtgctgtcctgcaccagtggacagaacggcggctggtgaaccacaagcagtacctggaggccaagaggctgttgaaggagttccaggcacgttaccggcagctggtgagtggctctctgcgcacagtgttcgggactaccccgctccccatggcctgcccagcgctgagtgagagccagcccaagttcggccacttcctcgagttcatggatgagttctgccaggagcccacagccagtgactcacaaggctagagctgtgcatgggggctgtgtgcaccacccggcctgtgccccagctctccccgagggctctgtgccctggaccgcacctcaaggttgaccagccggccacaggcctcagagctcagctgggccccacttgctggccacaaggtggcatccccttgtcaggatctcccctccttggcccaggcatgacctggtgcctggcccagcggcaataaagagtgggtgcacagggcaatagactgggtgccacatgcattctttcttggaacccaggccacagcagcattgtcacacttccctctaaaaatggttttccagttcagatgcaacagggatacatttgttctctgttgtatgagaaactgacaccaaggggatcttaacaaattcctgaacaatggctccaaaaaagggtatttttaaaaaccagatcttgtgagtacagccctaatgtgcagggacagtgtcatcctgtatattcgttctttactcagactctttcttggttccttcattaggagcatgaatggttgaatgtgaacatgacagtaaattggagcaaactgtaaactggacataacttatgccaaaagacgtagttgtacaccatggaaaccccatccctgctcctaatctctactgccattctgaatgccaaagcaagacatccaacatggggcatctcccagagcacatacagcaccaaaaatccacacacagcctaagcttaacccatgtttttgtctgagattgttcaccagagacaagactctgactataaacagaacatccactttcatgagtttcctttactgtattctcaacttgggccttgcttcaagcaggcaaacatacattgaagaatgcactttggtactgtttaaataacaacacatcagcccacttgattccatgccatgtccttgctgacagaaacatccccaacagggcatgccctggtccaagtcctctgtctttgtcaaaatgctcttctgatgagttggagaggaggcagccagcagtggcagtccacaaggatccaggtaccttctccaatcctaaagcagacagcaggttgaataaaaccaatacacaacctattttctaggcaggaggggaaaaggcccttaggacaataatatttgtacaaagagttgagagtaaacaaacagtgtatcaggttcaaaaaaaaaaaaactattcgttggcatttaaatttttttcccttgcatagtatctattctctcactaggacttttaagtgctctgctggaggctcagcgttggtaataccatgtttgatgcaaacttgaacccaatgctctcattggtggcacagctttggagggtggtggccccaagaaggggcaatctgcctgctgctatattaatctggaaccagggccaacagctactcttgaactatggtatttgaagagcgagttcattgcctgttttaccttaaatgacaggaaaggaagatgaacaaaccttgctttgccttggcttcaaactagttcttgatttaagacaccagaaagggagagagggagtctgcttagagtttgaggttgcctctcacaagatgacagttaaaagttgccaccttacttaaaaggcattaaggaggcatttactcacaaaggagagagagtaaatttttttcttaagaggaaaaaaatactgataatacatagaacaatctgcacatccagtcttggcactttttccaatttgactgatctctaaactggtgacccttgcatatatcttagtctcttttctacaatcttcttcagaaagctacagcagctaacaatcatgtataaagatgcatttcctagatcatcttcagaagaaaatctcttcagcactttccctagaatctgtctcctgaccaccccgccccagacctgctttctcttttgagaattcataaccaggtatgtttagataccagttcaaaagaccactctatgggttgatgaggaaaaggctgcctgaggacaatttaagaccataatgagtttccaatttttaaagaaaatttggctagctggcttttaattcttaattaaaatcattaaatttaattaaaattattccaatcaaaatatatcactttccaagattccacattcatattacttacttatactatggagactttctctacctgagcatgtattcaggggctataggtacatttaactctaactaactgaaaaaaatcaggaagaaaaaactattaaaataaaataacctcctaaatcatttgggggtatccccatcattgaaaaaaat

SEQ ID NO: 258 - protein, 821 aa, Homo sapiens
MGTDNSAPSPPGEKRWTRLNIGKIKLPKKVRRPGRRLPPTLSAVASQLLRRGEDSGRHRSGAAPRSPGGSQARIPPDWDVASADPSEAEATPEAGQGHWLVVQKGNLKKKPKGLVGAQAERRESLKATSFEFKGKKESRRENQVDLPGHILDQAFLLKHHCVRKPSDLCTINVSGLKFSKAKENDFKHFHSVIYINASENLLPLEAFHTFPALKELDLAFNGIKTIYVKYGDFKLLEFLDLSFNSLTVEAICDLGILPHLRVLLLTGNGLTSLPPNLAVAEQEASVTSLTSKRYILRFPALETLMLDDNRLSNPSCFASLAGLRRLKKLSLDENRIIRIPYLQQVQLYDESVDWNGGRGSPHKEPQFMLQSKPRMLEDSDEQLDYTVLPMKKDVDRTEVVFSSYPGFSTSEIAKEDAVLPVALFPSLCEFVFHNNPLVAHTRGVPPLLKSFLQERLGIHLIRRKIVKPKHHVLMSRKESWKVKSEIPKVPKQPLVLHHPRMTTTKSPSKDMLEPEAELAEDLPTTKSTSVESEMPTENLEGHSPSCRTFVPLPPICSNSTVHSEETLSHLSDTTVRLSPERPSDEDSKSTESIFLTQVSELPSSVIHKDDLELKEKDQKKPPTAPREVKGTRRKLPTAFLPSKYHGYEELLTAKPDPAFIEPKGIQKNAQALQQMLKHPLLCHSSKPKLDTLQKPYVHKEKRAQRIPIPPPKKTRAQLLDDIFIRLRDPRNITEAPLGAVLHQWTERRLVNHKQYLEAKRLLKEFQARYRQLVSGSLRTVFGTTPLPMACPALSESQPKFGHFLEFMDEFCQEPTASDSQG

SEQ ID NO: 259 - DNA, 101 bp, Homo sapiens
gccgcggggcttgctgggacttgaggttagacgtcccggccgtcggttgcggcctacactgtctgccgtcgcgtcgcagttactaaggcgtggggaagata

SEQ ID NO: 260 - DNA, 101 bp, Homo sapiens
gccggaggcaggtgcgactgaaacttagttttcgaattcgagtctttctctggcccaggtgtggagtttccaaaggagtgggcaggagcttgtccttcatc

SEQ ID NO: 261 - DNA, 101 bp, Homo sapiens
atcgcaaaagaggatgctgtcctaccagtagctctcttcccatctctctgtgagttcgtctttcataacaaccctctggtggcccatacacgaggtatagt

SEQ ID NO: 262 - DNA, 101 bp, Homo sapiens
aatcccaaaggtgccgaagcagcctctggtgctccatcacccgcgcatgaggacaaccaagtctccctcaaaggatatgctagagccagaggcagagctgg

SEQ ID NO: 263 - DNA, 101 bp, Homo sapiens
tgacaccaaggggatcttaacaaattcctgaacaatggctccaaaaaaggatatttttaaaaaccagatcttgtgagtacagccctaatgtgcagggacag

SEQ ID NO: 264 - DNA, 3802 bp, Homo sapiens
  exon (2501)..(2587)
  exon (3106)..(3301)
taataacatgcggcactagaactcaaatttgtctctttttattatatattatacactactgtgtatacggccttattaagaagtcttctaatttctgtctctccaaaccatctgaatagttttcctaaaaaccactttacacagtctcaaaacccttcaacagctttcctctacttcaagcaatccacggcctccctaatcagatgctatctacttgtcactacagttcctttagagagccttctagtcaactcaatacctgagaaacataaaacaccatcacatctgtgtaactttactcaaggagacttttttacctggcatgtctttcttttctccccccaaataaggtgccagttccactttcaggaatgaggcctttccttcaggctcttactctttttttttttttttttttgagacagagtttccctcttgttgcccaggctggactgcaatggcgtgatctcggctcactgcaacctccacctcccgggttcaagcgattctcctgcctcagcctcccgagtaggtgggattacaggcatgcaccaccacacttcgctaattttgtatttttagtagagatggggtttctccatcttggtctggctggtcttgaacttccgacctcaggtgatccgcctgccttggcctctcaaagtgctgggtttacaggtgtgagccactgcgcccggccgaggctcttactcttatcaataagctcgcagggttcactctatttctctcatttgaacttccgtaacaagtacacacttgagcgaatataccatatacttccttaaatagattcaattaccccatctcctatatttggctattctgagtgctctctgacagtaggattcttgatttactcctccaccatcacacatctgtactggacactacaggtaatggagatcattaatgtgtactgtcttacttggttcttcccaaaaccctgtgatctaggtgccagagattccaaaattccaaatgaagaaaggttaagtgacttgccaatcttcatactgttagcaagtagcagaaatacttcaaagctgaaatcttatgatccccacatccgggttctttcaataacacaatggtgccatatacactattccataataatagtattctatactgccttagcagaatgcccatacttaatgtttgctgatgatgatccaagtgcaaggaagagcaagagcagttagtggggcaggtaagcacaggctatgaggtgcttacctagcaagagggaaggatttgtgtacacaaatgaccatcaattccccatactctcacatgtcttgaagcaatttaccatcccaacctccagaatatgtttctgtatcttaaggtttgagtgtgaggccaggtgcatggtgacttatgcctgtaatcccagcactttggggagccaaggtgggaggatctcttgaggcccaggaatttgagaccagccagggcaacacagtaagaccctgactctacagaaaagttaaaagcaaaaaaattagtcaggcatagtggtgcacatttgcagtcccagctactcaggaagctggggtgggaagatcacctaagcttaagagttcaaggccgcagtgagctaagatccattctgggcaatggagcgtgacccctctcacaagagaagagtgtgagaaccatgtctttcaaaaccaatgacactcaaaaagacaagtaaaaagacctggatcttaacccctcaacataatcatgttttcatttcttaagcacctaccatgtgttatgcacagggaagtctgaaagctgttttcaattatattcaaaaattctgcttactatattaaagacaccatgcttaacaattctcatcaaaccagcccagggccctacaatgagagaactggaagggaatttagagttaagtccctcattttaaggctaaatctctcactttgcagatgagaaaacagatatagagagagcaagcatatttcaaggtcacaaagctaattagaggcaaaatcaacaccaggacgttgttctccgtgcaactgtttcttccaagatgctgtgcaaagagcaagaaaggccaacccagggacagttttcctttttttcttttcttttaaacccttgttgctaggactgcagttaaaaaaaatttttttggatgagcagagggaggaaaggggcaagcgtgagcgggcagcagtgcacttggtagcaaagagggaggtggagggaagagaggagagggcggggaaaaacaacaggaaaaaaagaaaaatcttaaaggcttcttgtcagcccagtagaacagtcaatactcaaatattttcagtattcgcctatcatgataaaacgcctaaaaacttcagtaagcaaaaggacaagaagcactttggaatctgtagcagcacgcaagggtgatggtggtagagagtttgggggatactgattctttaatctttgggcttcggttttccgtgtctgtgaaatgggcactgacaacagtgcacccagccccccaggagaaaagagatggacacgattaaatataggaaaaatcaaattaccgaaaaaggtgtggcgaccaggaccagaacacttgcgagaaaagaagaagttctaaagaggaccgggtccaggtttgaagtgtgatgagggcaagggcaggctccaagcgtgcgtagggttgtgatagtggtcacacaagggctcccctcaaaaggccgtagaaaataagggagaccgggatgggaaggttggctcgccgcctcccaggcctccccaggattcaactgttcccaagaaccggctcctcaccttatccaacaagccgctacggccacttcctgtcccgcagttggaagcaccaccagccccactacagcctccgctaccaccgcttctcccgccctgtacagctgccgccgccatcttgtccgcctctgcgtctccctcccctccgacttgtctgaagccgattggctggagctgacagcgtgacgcgccgcgcggagtcaatcgggatccgtagtttgggtcttgctggcgcgaggtagtcagaggacgtggccgcggggcttgctgggacttgaggttagacgtcccggccgtcggttgcsgcctacactgtctgccgtcgcgtcgcagttactaaggcgtggggaagatagcggcaggcaccgcagtggagcggctccgagatccccggggggctcgcaggcgcgcatccctcctgactgggacgtcgcctccgcagacccctcggaggctgaagcgacgccggaggcaggtgcgactgaaacttagttttcgaattcgagtctttctcyggcccaggtgtggagtttccaaaggagtgggcaggagcttgtccttcatccttttctagcccggttgtggcacttaccgattattctctcaagcagctgtcattttagctgtttgtaatgttttcgtgttaacggagaactcgcgtttactgagtgcctacagtctgccaggcagtatcctatgtgcacttccagccatcctctctctcactgagtcccacaacagccctgttagatgaggaggaaactaaagaacctacccaaagccagatagcatgtatctgaactcggttttcaagccggcatttaaaaaaaatcaaaaccaatatatatcccttctgacactctgcttttacggttttaggatgtaatagtattctagattttaattatttttttcacaaatgtatattgagcaccaatattgtactaacggatacaggggatcaagatagacctgg

SEQ ID NO: 265 - DNA, 1996 bp, Homo sapiens
  exon (501)..(594)
  exon (1380)..(1495)
ccccaaataagtgcccaggactggcctcagtgaaagagccatcagaagtgtgtagaggtttgtgctgaggaagatgaagtgtcaaattgtatcctgaagttaaagtcaatgccctgccaaccttccagaatctttatgagataaagagtttgttcgtacgaaaaatgtgtttgttcttattattttgccaccagcttccctagtatttgatgtaggctacatatccagcatggaaaaaagaggaaaaactcttagctcttaaacacgcaacagtgatggtggaatttcagacaggaggggcaaggtactctgtgcatgagtaggtattattacagggtcaaggcatcacccagcagtgagtcccatccacagcagcatgtcttacccaataccacccccaatcctagcaagcatgtagccctgcagtgaggggcctagacatacctgggtagaggtgaggggtggtgtcaacctgagagtctctcctgcattcattacagatcgcaaaagaggatgctgtcctaccagtagctctcttcccatctctctgygagttcgtctttcataacaaccctctggtggcccatacacgaggtatagtgcccgcaaacctgccccctctcaacccagtgcccaaggagcagtgtggcaccctcatccccacctcatcaatgccaagccctgggatctactctgtgtcggggtggacaaggttcatggtacattgaggaatggaggaaatagctctgtaccagcgcttcctgacagtaaccctgtgagcaggcattattgtccccacggacagtggtagaaactgaggctcagggaggttcatgatctgcccaaggtcacacagcaagaaagagtctgagttgggaatggaatatggaattctttaaatcctgtatgagctcttttgaaccacaccctgctttgtggaacagttctgtcatgacctcatttcccaattcccagttgcagaggggtgcagccccaactgcaggagcctctcttcccagagcacactgaatggagtggtcagcagtggagccactgtgtaagatacaggagttggaggcattttagagtcctgggccctggagtgacaccagtgaagttctgatcatcactccacactatctttattatcttggacaaattccttagcctctctgtgcctcagtttccttgcctattgaatgggaataatggtaggaggtaggaattctcctaggaggtaggaattctcgacctacctcctagggttgagaataagtttcagtaatacatgtaaagcaatttgaatagtgcctggcacatagtaagccccagtataaattttagctaatagtaatcttattttcccatcatggcaccaggggtccctccactgctgaagagcttcctccaggagcgactgggaatccacttaattcgaaggaagatagtaaagcctaagcatcatgttttgatgtctcggaaggaatcatggaaggtagggcttccaaggcaggactcccacccccaggaagagtgcagcctattataatgtatgcaaaccaacctggctgtagagctgctcactccacagtgcctggaatctctccattaggttcagcattgccttctcctttccttgctttgggaagagcactggatgaaacaacagatatgaaaatatattttaaactcctaaaactcttaccattgaaagttatagtcacctacagtaattgagaatggctatgggccaggcgtggtggctcacgcctctaatcccagcactttggaggccaaggcgagaggatcgcttgagggcaggagtttgagaccagcctgggtgagaccttgtctctacaaaaacaaaacaaaacaaaaaaaagaatagctaaggcaggaccagaatacatctcctgcctgaatcttaaggaagtgtttccttatgttgagagaagtctgcttcctttgccataaagtaagtgaaatccctctttca

SEQ ID NO: 266 - DNA, 1349 bp, Homo sapiens
  exon (501)..(848)
cctgaaaggggcctggtgctgtcatcttccagaaaatacaggaccattccccaacaccctctcctcggagtccctggggaaagccataggcaccatgttcaaccctcatctgaagaatgagactactgagggccagagtacgtatggtcagggatgcagcatgaagcctggagcccaggactggaattacatcgtccaggcactaccgccaaatcactctgggacttggacaggtcattttacctctctaagcccctgtttcctcatctataaaattggggataattattcattgggtagtttcaaggtagaaataaaacaacttacatcatgcatggggcacatcatagatgcccaacaagtatgatttccctttccacccccgcctcagtccgtacccagcactccggctgctatacaagtggccttaggctagtgaggcccaggaggagagaatcctaattaggaagcaaattcattctggcccttctccatgacaggtgaaaagcgaaatcccaaaggtgccgaagcagcctctggtgctccatcacccgcgcatgasgacaaccaagtctccctcaaaggatatgctagagccagaggcagagctggctgaagatctgcccactaccaaaagcacttctgtggagtcagagatgcccactgagaacctggaaggccattccccgtcttgccggaccttcgtgccactgcctcccatctgctccaactccactgtgcatagtgaagagaccctgtcccacctgagtgacacaactgtccgcctcagcccagagcgcccatcagatgaggactccaagagcacagagtccatcttcctgacccaggtacctgtatccagctgcccctgcccacttgttgctagctcccacaggttcctgtgcagcccttaggctcgattgctgtggacagctgggagcaacaagcacatggcaggtctggaaacaagaagtcagcacccttggtggagcttgcaagcctcttctgggagatctctggtctgaggacactgatagggatacctgatagggacacccatggggataagtcatggttctgtggcacagtcaagatctggggtctgactggggtgtgattccaactagtttttcagaggggtttgctgctgcctgtacctctctgcttcaggtctcctcacttttgatgctgcctctggatcctgggaacatagatcagatgcaggtcgtgcccttaaggtgctctcagtataatggggaacatagacaggaacagcttatgcaatcagtgctgagactgagggaatcccagaggctgggagtctggaggaaggagagatgcctctgccc

SEQ ID NO: 267 - DNA, 5366 bp, Homo sapiens
  exon (501)..(699)
  exon (1489)..(1604)
  exon (1813)..(1918)
  exon (2319)..(4865)
ggcatataatggtccttaccgatccgggtcctgcttaccactgcagttgcctatctcttcactttgtacttaactgtaccaatctttagttccccgaaaatgcaccttgatgtttcttacctctgcgcctttgctcgtgctgttccttgtctgaaacaatcattctttctcatcacttgcagtccacacctctccccattgctccgtagggatggctctcctggctcttcaagacttagctcaggctaaggcattcctccaagggagcttcttggctaggttggggcttcctctgggatcacccaaaaccactgtattccctctgttaaagcatttatcaattgtctatttttatatctgctttcttccatcccagtcttggtcttacccttgcccttaacagggcccagcagagaccagcacagagatgatactccgaatgttcatggaatgaatgaatgaatgagtgacaaatgaatgcgttttcttcctgggcacaggtgagtgaactgccttcctccgtcatccataaggatgatttagagttaaaggagaaagaccaaaagaaaccaccaacggcacccagagaggtgaaagggactcggaggaaactcccaactgccttccttcccagcaagtaccacggctatgaagaactgctgacagccaagcctgatccagccttcattgagccaaagggtatgtgagggcatatccttgctctagggcaagaggccatctccacagctcagagcaagtcagggtcaagccaaggctggcaccaagctgtcttttcccaactagggtgctgtcctctgtctaaatacctgtcaaagggctccttttagggtgtcctttgtttgaagccccacatattgggacccctgtcctggcctaggccttcactggcttatggggagccacagtttattcagagattctagttggtctcagcctagctgctctggatgataaagtctctcctcaggaaaagtgtgatgaatgaacacccagaatggccagattcttgagcttttcccagcccaggttaagttcccaaactgaacgtccaaaatcgttcctatctggttggaggcaaaggaggcagcttcatctctgtgttaatcagtacttccaaagcaactggcattcagctgggctgttctgggtgttagcccctgcgatataaccccctgaggttaatggggtcacattggagccagccttttcccccactccaatactatttacccattacaatctgtgctatttttccattataatatgggacaaatactcactgaagaatgatggaacttcaggcactggaacagatccggaagaaacctgggggcagtgttttcttttggggactctcaaatccttttacctagagctgctgtgagactgaggaatgaagcaatcaggggaggcatctgggaggaggagggggaagtgccttgactcagtcttgccttcttgccctaggaatccagaagaatgcacaagccctgcaacaaatgctgaagcacccactcctgtgccactcctccaagcccaagctggacactcttcagaaaccctatgttcacaaagagaaacgggtaaacatccagctcactgaatgtgtaaatggcccctgagtaccgcccacaattacagatgtggctgtcaccttgggaccctctgagggccatgctttcccagcacccccagatgccccccagcctgttgctgtgactgtatgaagttaggccagggaagtctgtgcataaacctgggataacaccctcctccatgaccttctgccaggcccagagaatcccgattccacccccaaagaagactagagcccaacttctggatgacatcttcattcgcttgcgggatccccggaacattacagaggctccactaggtacggctctgccacagctgccaggatcccagatccagttcacgcctgctggctaaaggcaaagaaagggcttgtgtcagtgcaggaaaggcccttagagagcaactgcctacatcagtctctacatgtagatggacaaaaggagagccagcgtgaggcagggagttgcctaaaatcacacagcatgttaaggtcctgaaccagggcttaagatagagtcaatgcataggggcagtaggaagtcagtgacttcccaagctggaaaggccatttttagccccttagcatcctcctgccacaccatcccattttccaagggtctctggacccaatcctcttgcttctggctaggtgagaaccaggatgagcttggtgcctctcctggcttcttttcctgcaggtgctgtcctgcaccagtggacagaacggcggctggtgaaccacaagcagtacctggaggccaagaggctgttgaaggagttccaggcacgttaccggcagctggtgagtggctctctgcgcacagtgttcgggactaccccgctccccatggcctgcccagcgctgagtgagagccagcccaagttcggccacttcctcgagttcatggatgagttctgccaggagcccacagccagtgactcacaaggctagagctgtgcatgggggctgtgtgcaccacccggcctgtgccccagctctccccgagggctctgtgccctggaccgcacctcaaggttgaccagccggccacaggcctcagagctcagctgggccccacttgctggccacaaggtggcatccccttgtcaggatctcccctccttggcccaggcatgacctggtgcctggcccagcggcaataaagagtgggtgcacagggcaatagactgggtgccacatgcattctttcttggaacccaggccacagcagcattgtcacacttccctctaaaaatggttttccagttcagatgcaacagggatacatttgttctctgttgtatgagaaactgacaccaaggggatcttaacaaattcctgaacaatggctccaaaaaaggrtatttttaaaaaccagatcttgtgagtacagccctaatgtgcagggacagtgtcatcctgtatattcgttctttactcagactctttcttggttccttcattaggagcatgaatggttgaatgtgaacatgacagtaaattggagcaaactgtaaactggacataacttatgccaaaagacgtagttgtacaccatggaaaccccatccctgctcctaatctctactgccattctgaatgccaaagcaagacatccaacatggggcatctcccagagcacatacagcaccaaaaatccacacacagcctaagcttaacccatgtttttgtctgagattgttcaccagagacaagactctgactataaacagaacatccactttcatgagtttcctttactgtattctcaacttgggccttgcttcaagcaggcaaacatacattgaagaatgcactttggtactgtttaaataacaacacatcagcccacttgattccatgccatgtccttgctgacagaaacatccccaacagggcatgccctggtccaagtcctctgtctttgtcaaaatgctcttctgatgagttggagaggaggcagccagcagtggcagtccacaaggatccaggtaccttctccaatcctaaagcagacagcaggttgaataaaaccaatacacaacctattttctaggcaggaggggaaaaggcccttaggacaataatatttgtacaaagagttgagagtaaacaaacagtgtatcaggttcaaaaaaaaaaaaactattcgttggcatttaaatttttttcccttgcatagtatctattctctcactaggacttttaagtgctctgctggaggctcagcgttggtaataccatgtttgatgcaaacttgaacccaatgctctcattggtggcacagctttggagggtggtggccccaagaaggggcaatctgcctgctgctatattaatctggaaccagggccaacagctactcttgaactatggtatttgaagagcgagttcattgcctgttttaccttaaatgacaggaaaggaagatgaacaaaccttgctttgccttggcttcaaactagttcttgatttaagacaccagaaagggagagagggagtctgcttagagtttgaggttgcctctcacaagatgacagttaaaagttgccaccttacttaaaaggcattaaggaggcatttactcacaaaggagagagagtaaatttttttcttaagaggaaaaaaatactgataatacatagaacaatctgcacatccagtcttggcactttttccaatttgactgatctctaaactggtgacccttgcatatatcttagtctcttttctacaatcttcttcagaaagctacagcagctaacaatcatgtataaagatgcatttcctagatcatcttcagaagaaaatctcttcagcactttccctagaatctgtctcctgaccaccccgccccagacctgctttctcttttgagaattcataaccaggtatgtttagataccagttcaaaagaccactctatgggttgatgaggaaaaggctgcctgaggacaatttaagaccataatgagtttccaatttttaaagaaaatttggctagctggcttttaattcttaattaaaatcattaaatttaattaaaattattccaatcaaaatatatcactttccaagattccacattcatattacttacttatactatggagactttctctacctgagcatgtattcaggggctataggtacatttaactctaactaactgaaaaaaatcaggaagaaaaaactattaaaataaaataacctcctaaatcatttgggggtatccccatcattggtgcgtgtgtctgcgtgtgtcaaactttaatgattatttattcagaccctggaaaaccacactataaaatagggcactggatcacaagttcgtttggttaaaaaaaaaaaaaaaaaaaagtgggggcggggggcagagaagaagtttaacttggatgatttccatgcccattccagctgtaacattctatgactgtgacccagcctttgttctcttttctcactctcctactagacatttcaatgaaaagttaggcaggaaaaaggaaaggaatcccaagttgctgccagctctgatgagagatcaggttgggggagagattaggtggttactgaattgaggtgtgggcctcccctgaccatgtcagtgatccacaacccacctcacttcttggggcttaagctaaaagcagcttctgaagagatgttaatgtcctgtaatcactagaggagaaaattcattctccttccataacattacttagtaaaggaaaagcggtgg

SEQ ID NO: 268 - DNA, 101 bp, Homo sapiens
gttttggctccaagtgcctaaaacccaaaaatatagtggcttaggaagatrgaacttttatttttatcccatgtattaataaataaaggcaattcagggat

SEQ ID NO: 269 - DNA, 101 bp, Homo sapiens
tgccagccagatgcattctagggaggtgtttgaaatctctggtctaggtamcatcatatttaaagttatactggaggtatatcatcatagctacatttagt

SEQ ID NO: 270 - DNA, 101 bp, Homo sapiens
tataataataactaaaaggaaataaacactgccagcaaagcagaataggtytcatttccagagctcaccattaggagtctgatcattattatcttaaaggc

SEQ ID NO: 271 - DNA, 101 bp, Homo sapiens
gtggacctcagtatgcataatgcgttgtggagttttatgtacaaaactatrtggaactgattttcagagcattgtaattaattatcaaggaaattttgacg

SEQ ID NO: 272 - DNA, 101 bp, Homo sapiens
atgatggataatttctgctctctagaagaaaggtacaccattaaaaaaacrgagatgttaatccaagaagaatgcacaccacagtttttaaacctactctt

SEQ ID NO: 273 - DNA, 101 bp, Homo sapiens
actgtcagcagagaaagcaccaaatctagtgagaaaaagtttcagcatatsttaaaatgacagaaaccaccttatccaacctagacttttctgccatggga

SEQ ID NO: 274 - DNA, 4759 bp, Homo sapiens
tagttattaaagttcctatgcagctccgcctcgcgtccggcctcatttcctcggaaaatccctgctttccccgctcgccacgccctcctcctacccggctttaaagctagtgaggcacagcctgcggggaacgtagctagctgcaagcagaggccggcatgaccaccgagcagcgacgcagcctgcaagccttccaggattatatccggaagaccctggaccctacctacatcctgagctacatggccccctggtttagggaggaagaggtgcagtatattcaggctgagaaaaacaacaagggcccaatggaggctgccacactttttctcaagttcctgttggagctccaggaggaaggctggttccgtggctttttggatgccctagaccatgcaggttattctggactttatgaagccattgaaagttgggatttcaaaaaaattgaaaagttggaggagtatagattacttttaaaacgtttacaaccagaatttaaaaccagaattatcccaaccgatatcatttctgatctgtctgaatgtttaattaatcaggaatgtgaagaaattctacagatttgctctactaaggggatgatggcaggtgcagagaaattggtggaatgccttctcagatcagacaaggaaaactggcccaaaactttgaaacttgctttggagaaagaaaggaacaagttcagtgaactgtggattgtagagaaaggtataaaagatgttgaaacagaagatcttgaggataagatggaaacttctgacatacagattttctaccaagaagatccagaatgccagaatcttagtgagaattcatgtccaccttcagaagtgtctgatacaaacttgtacagcccatttaaaccaagaaattaccaattagagcttgctttgcctgctatgaaaggaaaaaacacaataatatgtgctcctacaggttgtggaaaaacctttgtttcactgcttatatgtgaacatcatcttaaaaaattcccacaaggacaaaaggggaaagttgtcttttttgcgaatcagatcccagtgtatgaacagcagaaatctgtattctcaaaatactttgaaagacatgggtatagagttacaggcatttctggagcaacagctgagaatgtcccagtggaacagattgttgagaacaatgacatcatcattttaactccacagattcttgtgaacaaccttaaaaagggaacgattccatcactatccatctttactttgatgatatttgatgaatgccacaacactagtaaacaacacccgtacaatatgatcatgtttaattatctagatcagaaacttggaggatcttcaggcccactgccccaggtcattgggctgactgcctcggttggtgttggggatgccaaaaacacagatgaagccttggattatatctgcaagctgtgtgcttctcttgatgcgtcagtgatagcaacagtcaaacacaatctggaggaactggagcaagttgtttataagccccagaagtttttcaggaaagtggaatcacggattagcgacaaatttaaatacatcatagctcagctgatgagggacacagagagtctggcaaagagaatctgcaaagacctcgaaaacttatctcaaattcaaaatagggaatttggaacacagaaatatgaacaatggattgttacagttcagaaagcatgcatggtgttccagatgccagacaaagatgaagagagcaggatttgtaaagccctgtttttatacacttcacatttgcggaaatataatgatgccctcattatcagtgagcatgcacgaatgaaagatgctctggattacttgaaagacttcttcagcaatgtccgagcagcaggattcgatgagattgagcaagatcttactcagagatttgaagaaaagctgcaggaactagaaagtgtttccagggatcccagcaatgagaatcctaaacttgaagacctctgcttcatcttacaagaagagtaccacttaaacccagagacaataacaattctctttgtgaaaaccagagcacttgtggacgctttaaaaaattggattgaaggaaatcctaaactcagttttctaaaacctggcatattgactggacgtggcaaaacaaatcagaacacaggaatgaccctcccggcacagaagtgtatattggatgcattcaaagccagtggagatcacaatattctgattgccacctcagttgctgatgaaggcattgacattgcacagtgcaatcttgtcatcctttatgagtatgtgggcaatgtcatcaaaatgatccaaaccagaggcagaggaagagcaagaggtagcaagtgcttccttctgactagtaatgctggtgtaattgaaaaagaacaaataaacatgtacaaagaaaaaatgatgaatgactctattttacgccttcagacatgggacgaagcagtatttagggaaaagattctgcatatacagactcatgaaaaattcatcagagatagtcaagaaaaaccaaaacctgtacctgataaggaaaataaaaaactgctctgcagaaagtgcaaagccttggcatgttacacagctgacgtaagagtgatagaggaatgccattacactgtgcttggagatgcttttaaggaatgctttgtgagtagaccacatcccaagccaaagcagttttcaagttttgaaaaaagagcaaagatattctgtgcccgacagaactgcagccatgactggggaatccatgtgaagtacaagacatttgagattccagttataaaaattgaaagttttgtggtggaggatattgcaactggagttcagacactgtactcgaagtggaaggactttcattttgagaagataccatttgatccagcagaaatgtccaaatgatatcaggtcctcaatcttcagctacagggaatgagtaactttgagtggagaagaaacaaacatagtgggtataatcatggatcgcttgtacccctgtgaaaatatattttttaaaaatatctttagcagtttgtactatattatatatgcaaagcacaaatgagtgaatcacagcactgagtattttgtaggccaacagagctcatagtacttgggaaaaattaaaaagcctcatttctagccttctttttagagtcaactgccaacaaacacacagtaatcactctgtacacactgggatagatgaatgaatggaatgttgggaatttttatctccctttgtctccttaacctactgtaaactggcttttgcccttaacaatctactgaaattgttcttttgaaggttaccagtgactctggttgccaaatccactgggcacttcttaaccttctatttgacctctgcgcatttggccctgttgagcactcttcttgaagctctccctgggcttctctctcttctagttctattctagtctttttttattgagtcctcctctttgctgatcccttccaagggttcaatatatatacatgtatatactgtacatatgtatatgtaactaatatacatacatacaggtatgtatatgtaatggttatatgtactcatgttcctggtgtagcaacgtgtggtatggctacacagagaacatgagaacataaagccatttttatgcttactactaaaagctgtccactgtagagttgctgtatgtagcaatgtgtatccactctacagtggtcagcttttagtagagagcataaaaatgataaaatacttcttgaaaacttagtttactatacatcttgccctattaatatgttctcttaacgtgtgccattgttctctttgaccattttcctataatgatgttgatgttcaacacctggactgaatgtctgttctcagatcccttggatgttacagatgaggcagtctgactgtcctttctacttgaaagattagaatatgtatccaaatggcattcacgtgtcacttagcaaggtttgctgatgcttcaaagagcttagtttgcggtttcctggacgtggaaacaagtatctgagttccctggagatcaacgggatgaggtgttacagctgcctccctcttcatgcaatctggtgagcagtggtgcaggcggggagccagagaaacttgccagttatataacttctctttggcttttcttcatctgtaaaacaaggataatactgaactgtaagggttagtggagagtttttaattaaaagaatgtgtgaaaagtacatgacacagtagttgcttgataatagttactagtagtagtattcttactaagacccaatacaaatggattatttaaaccaagtttatgagttggttttttttcattttctatttgtattttattaagagtgtcttttcttatgtgattttttttaattgctatttgatatggtttggctatatgtccccacccaaatctcatcttgaattataatccccatgtgtcaagggagggacctgacgggaggtgattggatcacgggggcagttgtccccatgctgttcttgggatagtgagttagttctcatgagatctgatggttttataagtgtttgacaattcctcctttacacacactctctctctcatctgctgccatgtaagacttgcctgcttccccttctgccatgattgtaagtttcctgaggcctcctcagccatgtggaactgtgaatctattaagcctcttttctttataaatgaaaa

SEQ ID NO: 275 - protein, 925 aa, Homo sapiens
MTTEQRRSLQAFQDYIRKTLDPTYILSYMAPWFREEEVQYIQAEKNNKGPMEAATLFLKFLLELQEEGWFRGFLDALDHAGYSGLYEAIESWDFKKIEKLEEYRLLLKRLQPEFKTRIIPTDIISDLSECLINQECEEILQICSTKGMMAGAEKLVECLLRSDKENWPKTLKLALEKERNKFSELWIVEKGIKDVETEDLEDKMETSDIQIFYQEDPECQNLSENSCPPSEVSDTNLYSPFKPRNYQLELALPAMKGKNTIICAPTGCGKTFVSLLICEHHLKKFPQGQKGKVVFFANQIPVYEQQKSVFSKYFERHGYRVTGISGATAENVPVEQIVENNDIIILTPQILVNNLKKGTIPSLSIFTLMIFDECHNTSKQHPYNMIMFNYLDQKLGGSSGPLPQVIGLTASVGVGDAKNTDEALDYICKLCASLDASVIATVKHNLEELEQVVYKPQKFFRKVESRISDKFKYIIAQLMRDTESLAKRICKDLENLSQIQNREFGTQKYEQWIVTVQKACMVFQMPDKDEESRICKALFLYTSHLRKYNDALIISEHARMKDALDYLKDFFSNVRAAGFDEIEQDLTQRFEEKLQELESVSRDPSNENPKLEDLCFILQEEYHLNPETITILFVKTRALVDALKNWIEGNPKLSFLKPGILTGRGKTNQNTGMTLPAQKCILDAFKASGDHNILIATSVADEGIDIAQCNLVILYEYVGNVIKMIQTRGRGRARGSKCFLLTSNAGVIEKEQINMYKEKMMNDSILRLQTWDEAVFREKILHIQTHEKFIRDSQEKPKPVPDKENKKLLCRKCKALACYTADVRVIEECHYTVLGDAFKECFVSRPHPKPKQFSSFEKRAKIFCARQNCSHDWGIHVKYKTFEIPVIKIESFVVEDIATGVQTLYSKWKDFHFEKIPFDPAEMSK

SEQ ID NO: 276 - DNA, 101 bp, Homo sapiens
gtggattatgcatttaagaatatgtgtgtgtgtgtatgtatatgtgtgtgcgtatatatataatatatatttcaaattctgttttaatatatatttcaagt

SEQ ID NO: 277 - DNA, 101 bp, Homo sapiens
cagactcatgaaaaattcatcagagatagtcaagaaaaaccaaaacctgtccctgataaggaaaataaaaaactgctctgcagaaagtgcaaagccttggc

SEQ ID NO: 278 - DNA, 1092 bp, Homo sapiens
tgcctgtaatcccagcactttgggaggatgaggtgggtggatcacgaggtcaggaattcaagaccagcctggccaacatgatgaaatcctgtctctactaaaaatacaaaaattagccatgcatggttgctgatgcctgtaatcccagctactcgggaggctgaggcaaagaattgcttgaacctgggaggcggaggttgcagtgagcgaagatcgtgccactgcactccagcctaggcggtagaccaagactccatctcaaaaaaaaaaaaaaaaaaagtcttagagattaaaccatatcaggttacagagatctatgccattttagttaattattacatagagttcaattccaaaatgctttttttctcaggtttgtcagtctgaaaactgtacgtgtactaactttaaatttttttctttttgcatgtatttcaatattgaattaatacaaatgatttataaggagtgtccaattgataattgcttttcattttcaggctttaaaaaattggattgaaggaaatcctaaactcagttttctaaaacctggcatattgactggacgtggcaaaacaaatcagaacacaggtatttatatatagtgaattagatttagtggattatgcatttaagaatatgtgtgtgtgtgtatgtatatgtgtgtgygtatatatataatatatatttcaaattctgttttaatatatatttcaagttctgttttaatgcttctatcagtcaaggtttaaccacagaagcaaaagcagtaggtgattatacatatatatgagaggtgtgtgttgtatatgtgtccacatatgcatatatacagagatttcttgcaaggaattttacacaattgggctggcaaagcaagtctgaagcgtgtagggcaggtagtcaggaagagactatcaggaacagactggaaccccccagacatgagctgtttggagtctctgactttggagaaggcctaagccgtcttttaaaaggctcacctgattaggccaggcccacctggagtgaactctcttttgatctgacttaaagtcaactgattagggacttgaatcccatcggtaaaat

SEQ ID NO: 279 - DNA, 1145 bp, Homo sapiens
ccataacacgtgggaattctgttaagatacaattcaagttgagatttgggtgaggacacagccaaaccatatcaggggctcttctgcctgttgtatcactcactgagtttgtgcctgcaaatggatataattatgcctgaaacagcgcatattgtatatctggtacaggttttgttttttttcccaagttttgccaaacactaaagtagaaagcatagttcatatgactattctatggacatctttagtgcttttatgagcatttttgatgaagaaattgaaagactaattggaggccacaattaagcattgactaatactaagttaggagaaccaataaaatctgtgattttacaaagtcaggtaccatatgttcatggaagttgtatatgaatgattatacatgtgcgtgcatgtatatgtattgtacgtatctgtgcctgtttcttgctatatatgttgtactcaaattacatttgcggtctttctttttgcattagattctgcatatacagactcatgaaaaattcatcagagatagtcaagaaaaaccaaaacctgtmcctgataaggaaaataaaaaactgctctgcagaaagtgcaaagccttggcatgttacacagctgacgtaagagtgatagaggtaagctgcctttttacaaagtgcctggtcatgttttagcactagctacagcttactgttggtgaaatatttataataaaactactattatttccattgttactgtggccatgatctgtgtatttaaaaaaagctaagaagtgaaaaaaaaatactaaatgttcaataataaagaaatagtttttggccaggcatagtggctcatgcctgtaatcaaaacactttgggaggccaaggtgggcgatcacgaggtcaggagttcgagaccagcccggccaacatggtgaaaccccgtctctactaaaaataaaaaagttagctgggcgtagtggcaggtggctgtaatcttagttactcgggaggctgaggcaggagaatcgcttgaaccgggaggcagaggttgcggtgagctgatatcgcgccactgcgctccagcctgggtgacagagcaagactctgtctcaaaaaaaaaaaaaaaaaagtcatgctaaatgcaatgac

SEQ ID NO: 280 - DNA, 2870 bp, Homo sapiens
gcccggcaggttggcggaccggcgggaggcgcagcctgggcagagctcagcttggtcccgccgcccggccggtgctccctggcgcagccacgcaggcgcaccgcagacagacccctctgccatgaaccagtccatcccagtggctcccaccccaccccgccgcgtgcggctgaagccctggctggtggcccaggtgaacagctgccagtacccagggcttcaatgggtcaacggggaaaagaaattattctgcatcccctggaggcatgccacaaggcatggtcccagccaggacggagataacaccatcttcaaggcctgggccaaggagacagggaaatacaccgaaggcgtggatgaagccgatccggccaagtggaaggccaacctgcgctgtgcccttaacaagagccgggacttccgcctcatctacgacgggccccgggacatgccacctcagccctacaagatctacgaggtctgctccaatggccctgctcccacagactcccagccccctgaggattactcttttggtgcaggagaggaggaggaagaagaggaagagctgcagaggatgttgccaagcctgagcctcacagatgcagtgcagtctggcccccacatgacaccctattctttactcaaagaggatgtcaagtggccgcctactctgcagccgcccactctgcagccgcccgtggtgctgggtccccctgctccagaccccagccccctggctcctccccctggcaaccctgctggcttcagggagcttctctctgaggtcctggagcctgggcccctgcctgccagcctgccccctgcaggcgaacagctcctgccagacctgctgatcagcccccacatgctgcctctgaccgacctggagatcaagtttcagtaccgggggcggccaccccgggccctcaccatcagcaacccccatggctgccggctcttctacagccagctggaggccacccaggagcaggtggaactcttcggccccataagcctggagcaagtgcgcttccccagccctgaggacatccccagtgacaagcagcgcttctacacgaaccagctgctggatgtcctggaccgcgggctcatcctccagctacagggccaggacctttatgccatccgcctgtgtcagtgcaaggtgttctggagcgggccttgtgcctcagcccatgactcatgccccaaccccatccagcgggaggtcaagaccaagcttttcagcctggagcattttctcaatgagctcatcctgttccaaaagggccagaccaacaccccaccacccttcgagatcttcttctgctttggggaagaatggcctgaccgcaaaccccgagagaagaagctcattactgtacaggtggtgcctgtagcagctcgactgctgctggagatgttctcaggggagctatcttggtcagctgatagtatccggctacagatctcaaacccagacctcaaagaccgcatggtggagcaattcaaggagctccatcacatctggcagtcccagcagcggttgcagcctgtggcccaggcccctcctggagcaggccttggtgttggccaggggccctggcctatgcacccagctggcatgcaataacaaggctgcagacggtgactggccctggcttcctgggtggcggtgcggactgatgtggagatgtgacagccccgatgagcacctggctggctgcagggtcctacctctgggtttcctggaagtggatttgggccaagaaggagagggagaaaggcccgagcccctgccttcccgggcctttctctcctgggctgtctctggtctggtcagcctggctctcgggaaattcagccatgagcagggaaagaactctcccaaccctggggcctagctgtataggaggaattgcctaagggtggcccactcttgtgattgccccatttcctctggcaacaaaagccagagtgttgtgggccaagtccccccacagggcctctgcagggcatggccctgatttccctggtttgagactcacttcctcatctccctgtcctctgagataatatgagtgagcacttaggtatcatatcagatgctcaaggctggcagctacccccttcttgagagtccaagaacctggagcagaaataatttttatgtatttttggattaatgaatgttaaaaacagactcagctgtttctttccttttactactaccagttgctcccatgctgctccaccaggccctgtttcggatgccaactggcccactccccaagcacttgcccccagcttgcgaccattggcactgggagggcctggcttctgggctgatgggtcagttgggccttcataaacactcacctggctggctttgccttccaggaggaagctggctgaagcaagggtgtggaattttaaatgtgtgcacagtctggaaaactgtcagaatcagttttcccataaaagggtgggctagcattgcagctgcatttgggaccattcaaatctgtcactctcttgtgtatattcctgtgctattaaatatatcagggcagtgcatgtaaatcatcctgatatatttaatatatttattatattgtcccccgaggtggggacagtgagtgagttctcttagtccccccagagctggttgttaaagagcctggcacctacccgctctcacttcatctgtgtcatctctgcacactccagcccactttctgccttcagccattgagtggaagctgccccaggcccttaccaggtgcagatgcccaatcttgatgcccagccatcagaactgtgagccaaataaacctttttctgtataaaaaaaaaaaaaaaaaaaa

SEQ ID NO: 281 - protein, 504 aa, Homo sapiens
MNQSIPVAPTPPRRVRLKPWLVAQVNSCQYPGLQWVNGEKKLFCIPWRHATRHGPSQDGDNTIFKAWAKETGKYTEGVDEADPAKWKANLRCALNKSRDFRLIYDGPRDMPPQPYKIYEVCSNGPAPTDSQPPEDYSFGAGEEEEEEEELQRMLPSLSLTDAVQSGPHMTPYSLLKEDVKWPPTLQPPTLQPPVVLGPPAPDPSPLAPPPGNPAGFRELLSEVLEPGPLPASLPPAGEQLLPDLLISPHMLPLTDLEIKFQYRGRPPRALTISNPHGCRLFYSQLEATQEQVELFGPISLEQVRFPSPEDIPSDKQRFYTNQLLDVLDRGLILQLQGQDLYAIRLCQCKVFWSGPCASAHDSCPNPIQREVKTKLFSLEHFLNELILFQKGQTNTPPPFEIFFCFGEEWPDRKPREKKLITVQVVPVAARLLLEMFSGELSWSADSIRLQISNPDLKDRMVEQFKELHHIWQSQQRLQPVAQAPPGAGLGVGQGPWPMHPAGMQ

SEQ ID NO: 282 - DNA, 101 bp, Homo sapiens
cagaaacagaaattttgaagagcaagagttaccaagcgaagaacattccaggagaaggaacaggaggtgtgtgaaggtggaggttctggggtgaggttctt

SEQ ID NO: 283 - DNA, 101 bp, Homo sapiens
ctgggggcagcgactgtgttctagggcgagagccaccctcgccaggggtgcaggcaggcgagaggagggcctggagctgtgggtcggccacactgcgccct

SEQ ID NO: 284 - DNA, 105 bp, Homo sapiens
ttgccaggtcagtgcggggcccggagtggattcgcggggcggggcggggcggggcactgcccgcgcccggagctcagcagcagctgcccaggggcgggggcggca

SEQ ID NO: 285 - DNA, 100 bp, Homo sapiens
actcaaagaggatgtcaagtggccgcccactctgcagccgcccactctgcagccgcccgtggtgctgggtccccctgctccagaccccagccccctggct

SEQ ID NO: 286 - DNA, 101 bp, Homo sapiens
gagtccaagaacctggagcagaaataatttttatgtatttttggattaataaatgttaaaaacagactcagctgtttctttccttttactactaccagttg

SEQ ID NO: 287 - DNA, 101 bp, Homo sapiens
acagactcagctgtttctttccttttactactaccagttgctcccatgctactccaccaggccctgtttcggatgccaactggcccactccccaagcactt

SEQ ID NO: 288 - DNA, 51 bp, Homo sapiens
ggtgaaacatgaaatcgcaacagcatgaacagttaaaacctacagaggact

SEQ ID NO: 289 - DNA, 3097 bp, Homo sapiens
gagccccatatcaatgctgccggcttggtaacatcatcccccttttagagacgaggaaatgagatttgaggtcctacttaaggccacttggctggaatacagcaaagccaggtgcaagccccttctctgcacgcagcccgtgctgcttcttgaggttcagaggctctaaggaaggggcctcacctgagcaagatggacagtgggaagggggcagagggcagaattctagggtctcacggtccctcagaatgggtgaggagtatttgataacaaaagaaggctcttcttagctattgctccagatacgaccagcatagaatatttttctattaagcataactgacctccagtgaaaaaggttcccattttgtggggagccacttttgaaatagcaatttcattttattattattattttgagataagatctcacttctacgcccaggctggagtgcggtggtgtgcctcctgggttcaagcaattctcccacctcagcctcccaagtaggtggaactataggtgtgtgtcaccacgccaggctaatttttgtattttttgtagagacaaggttttgccatattgcccaggctggtctcgaactcttggactcaagtgatctgcctgccttagcctctcaaagtgttgggattacaaatgtgagccaccgtgcctggcctagcaatttcatttttaaagaaagaaatataaaacgatctacccattcacattttccccatccatactttaaattttaaaaatatgaaataatgaaatactcagcagatacaaataataaaatacttatatataatgatatttcgacttcatattagggcttcaaaggtcaggaaagagggagagatacagaagagaaaaaaaaaaaacgttaacacatgagtgtctttttttaacttgttaaaggtaaagttcaacccaggagaagggaggggagggaaggtcaaagttctgattcatcaacaaatactactttatttgttaaaaatacaaggctctgcttggcgcagtggctcccgcctgtaatcccagcactttgggaggccaaggcgggtggatcgcctgaggtcaggagctcgagaccagcctggccaacatggtgaaaccccgtctctacttgggaggctgaggcaggagaatcgcttgaactggggaggcagaggttgcagtgagctgagatcgcactgctgcactccagcccgggtgacagagcaagactccatatcaaaaaataaaataaaataaaatgaacaatgaaaagacaggagggaggttcctgagtaagctgattcgagtggaaatcagacatcaaaattgaaacccgctgaattttccaaaaagccagatgctcatagaactgaagcttgagacacttacatcagtacacctgctgcctgttgaccaattcctcttccttgtccctcctgttttccttccctgctatataagcccctaactttagtcaaggggagggatggattggaggtttgtctcccctctcaacagctcactggctgatgtcaccggaataaagtcttccctggcaatactcgctgtctcagtgataggctttctgtgcggtgagcagccagacctggaccaaacccctggcaatccataacaaaatcataagcaaaatcaaccaggaagctatttgcaccctggaaccccacctgggaggggaagtcaaggcagactttccagagaaggcgatgctgaaaatttcagaaacagaaattttgaagagcaagagttaccaagcgaagaacattccakgagaaggaacaggaggtgtgtgaaggtggaggttctggggtgaggttctttatggaatcgaaaacggttcagaaccacaggtcgacggtcaaggtagtagtgagaggaggtgggacaggcgaccacgccgctgcccctgggatgactggaaggcgacttaggggagctggggcgagacaggtgcagggtttgaggatgagaaaggcacagagtgactagaggattcccgcctgcaagcacatctggaaggggtgtctggatcctgggggcagcgactgtgttctagggcgagagccaccctcgccaggggtgyaggcaggcgagaggagggcctggagctgtgggtcggccacactgcgccctcatttgtgtgcagccccggaggaccagagtggggaagcaccccaccctctcccagggcccaactgagcactgcagcgggaggtacggggttgtcaaatgacagttttgccattccagattgccaaaagagccagtggccagtctagggcaccgcgccgtctggcatctccctggaggccctgggcctggcccgaggctcagcccggatctgcagttgccaggtcagtgcggggcccggagtggattcgcggggcggggcggggcggggcactgcccgcgcccggagctcagcagcagctgcccaggggcgggggcggcaagacgcggaagtgcccggcaggttggcggaccggcgggaggcgcagcctgggcagagctcagcttggtcccgccgcccggccggtgctccctggcgcagccacgcaggcgcaccgcagacaggtgggtcccggccgccgcgctctcctctctgcgtccgcgcccggcgcgccccgagggtggcgggagcggtgccggctactgcccccaagtctaggcctagactgggccccgcgccccccaggcacctgcgggcggcgggatgaagactggagtagggcggggtccgcgtccagctgcgcctggaaagcgagctcgggggggtgcctacagcagggtgcgcccggccggcctgggacttccaaagcgcctcccacgccccgatcggtttggggtgctggcgcccggggagcccagtgacccaggcggcggagtgggcagcgctgcggggggcgccggctctgctgctctccctccccctcgccatcgcccagaatgggggttcccgggagccccgctggaggctggcttggaccacagaggagcgaggcccgatccttactttcgatgcactcgcccttgctcttaccgggccaccctcaccctttcggaaaagaggttgag

SEQ ID NO: 290 - DNA, 5158 bp, Homo sapiens
gtcctcccaccttggcctcccaaaatgttgggattacaggtgcgagccactgtgcccagccaacatcaaccccttgagtcttcgctgccactccatgaggtgggcaactgtgaggagatcaagacaaagggaggcagtgacatggcctggcacacagctggcggggggcacttccagattcaaacccagcctggctccagggtgctcacccttatcccgcacgctgtcctccttagagatcacactgtttcaccctcccaggagcagggactatggatgcatctcatagcccctagatttcatgtagcttgctggcagcctgagggctggggcaggactgtggcagactcccacgctgcaaaccaggtctggggctcagcgaggctcagcctgtagccgaagttctccccacacagtagagtctcctatgggacaggaggcagactggggctgtggcagggatgaggttctctgtggtcggctatttcttcctgccccaggcctgggccaaggagacagggaaatacaccgaaggcgtggatgaagccgatccggccaagtggaaggccaacctgcgctgtgcccttaacaagagccgggacttccgcctcatctacgacgggccccgggacatgccacctcagccctacaagatctacgaggtctgctccaatggccctgctcccacaggtatcaggcctagccctctgtgggccacctgggaggctgtgcaatgtcctggcccccagccatgagctcttgggtgcaggcaggccaagggcccctctagcaggcagtggtccaggaaacgatgcgggggctcccgctaggtcatgacacccagggcttccaggagtggctgggatgggtcactggcatatcaggaatggcttggcgtgcagtcagggacctgggtgcttcttccttaccattgccctcgttttggcttctggctccagcctaggtctcatggcccatggagtcggggaggtctttcccaatcctggtggctgtgccctccacctcgccctgtgttgggggcagctttggggaaggcagaagctgcataggagctacaggcagcctctcaggggatcttgcttctcctccgacattgactcctttactgccctgcttttctctccctgctgtgcagactcccagccccctgaggattactcttttggtgcaggagaggaggaggaagaagaggaagaggtgagtgtgggttgaggaggcaggtggagccctggacgagctctctgctgtccccatcggccttaggtttccgcagccccactcccatggagccccgtggccctctcaatagttctccttgtttcttctcctgggattctgaacgataggagcacagtccccacctgctccttcccagggcattgtcattaccctgtgtgtgtgacccacgcagcagttggggcttggtaggtctgactccctgcagaaggcaaatgaggaaagtgaggcaaagggcttttctgacctgcctgggatggacgagctgggaccggaggcagggtcttgcctgagctaaactgaggctaggggagttgcctcatagttctcgcctgttatttccccagccccaggtcagtggaataacctgtcctcctttctctcccatctcttccctcccttgctggtggtgtcccttcagctgcagaggatgttgccaagcctgagcctcacaggtggggccgggaggtggtggttgggggtctagtatacagagaagctataggtaccataggtacctggaagggggctgatgggaggctagggtggcccagggctgggaggaggtgtgcctgggaggcagttcgtggaggtggcactgacagccgtccacacgcactctctgtagatgcagtgcagtctggcccccacatgacaccctattctttactcaaagaggatgtcaagtggccgcccactctgcagccgcccactctgcagccgcccgtggtgctgggtccccctgctccagaccccagccccctggctcctccccctggcaaccctgctggcttcagggagcttctctctgaggtcctggagcctgggcccctgcctgccagcctgccccctgcaggcgaacagctcctgccagacctgctgatcagcccccacatgctgcctcgtaaggacccatggctgggcacggggaagcagtgctgggggattggggtaggattggcaaggagggtggagggtgctggactcccttgggtgggaaaagtgggagggcggatggggctgggcctggccactgggctgcagaatggggaggcgtggggctcaaggacgggatgggcctgccttctgccccacagtgaccgacctggagatcaagtttcagtaccgggggcggccaccccgggccctcaccatcagcaacccccatggctgccggctcttctacagccagctggaggccacccaggagcaggtggaactcttcggccccataagcctggagcaagtgcgcttccccagccctgaggacatccccagtgacaagcagcgcttctacacgaaccagctgctggatgtcctggaccgcgggctcatcctccagctacagggccaggacctttatgccatccgcctgtgtcagtgcaaggtgttctggagcgggccttgtgcctcagcccatgactcatgccccaaccccatccagcgggaggtcaagaccaagcttttcagcctggagcattttctcaatggtgagggcccaaagctgtgatcctcctggctgcctcttgcccagggcatggttccagcctctgactagggaccttgattttgatgcagagctcatcctgttccaaaagggccagaccaacaccccaccacccttcgagatcttcttctgctttggggaagaatggcctgaccgcaaaccccgagagaagaagctcattactgtacaggtacatctcccctatcccaaagtcggccttggcttgaaaactggggaatcctggggctaggcccttgccccaggctggaggctcagggctccctgagcagtgtgaacttggcggccagagaccatcaaggctcagagccggagaatgcggtctattactcacccctgatggctgtcctcatgcacagctggatctggcagccctgccacaggtctccctgtctcatctcctctttgcctcccaggtggtgcctgtagcagctcgactgctgctggagatgttctcaggggagctatcttggtcagctgatagtatccggctacagatctcaaacccagacctcaaagaccgcatggtggagcaattcaaggagctccatcacatctggcagtcccagcagcggttgcagcctgtggcccaggcccctcctggagcaggccttggtgttggccaggggccctggcctatgcacccagctggcatgcaataacaaggctgcagacggtgactggccctggcttcctgggtggcggtgcggactgatgtggagatgtgacagccccgatgagcacctggctggctgcagggtcctacctctgggtttcctggaagtggatttgggccaagaaggagagggagaaaggcccgagcccctgccttcccgggcctttctctcctgggctgtctctggtctggtcagcctggctctcgggaaattcagccatgagcagggaaagaactctcccaaccctggggcctagctgtataggaggaattgcctaagggtggcccactcttgtgattgccccatttcctctggcaacaaaagccagagtgttgtgggccaagtccccccacagggcctctgcagggcatggccctgatttccctggtttgagactcacttcctcatctccctgtcctctgagataatatgagtgagcacttaggtatcatatcagatgctcaaggctggcagctacccccttcttgagagtccaagaacctggagcagaaataatttttatgtatttttggattaatraatgttaaaaacagactcagctgtttctttccttttactactaccagttgctcccatgctrctccaccaggccctgtttcggatgccaactggcccactccccaagcacttgcccccagcttgcgaccattggcactgggagggcctggcttctgggctgatgggtcagttgggccttcataaacactcacctggctggctttgccttccaggaggaagctggctgaagcaagggtgtggaattttaaatgtgtgcacagtctggaaaactgtcagaatcagttttcccataaaagggtgggctagcattgcagctgcatttgggaccattcaaatctgtcactctcttgtgtatattcctgtgctattaaatatatcagggcagtgcatgtaaatcatcctgatatatttaatatatttattatattgtcccccgaggtggggacagtgagtgagttctcttagtccccccagagctggttgttaaagagcctggcacctacccgctctcacttcatctgtgtcatctctgcacactccagcccactttctgccttcagccattgagtggaagctgccccaggcccttaccaggtgcagatgcccaatcttgatgcccagccatcagaactgtgagccaaataaacctttttctgtataaattacccagcctcgggtcttcgtttacagcaacgcaaaatagattaaacccccataaatgttcaaggataccttgccccacagcctcgtccacagaatatattgtcactgtttggatttttgccaacctgacaggtgagatagtatctcagtgccacttctcattatcagcaaggctgagtagcttttcacatggttaagtggcctgtacagatttttttaaataattttagaatggttttagatttatggaaaagttcctaatagagttcctatggacccacactttctccaattgttaacatcttacattactatggcacacttgtgacaataatgaaaccatgtggacaattactatgaactcaacttctttatttggatttcatgagtttttcggatatcctttttctgttccaggatactatccaagatatcacattacattcacttgtcacatctccttagactcctctggtctatgacagtttcttagact

SEQ ID NO: 291 - DNA, 3453 bp, Homo sapiens
gggccgccgcagaggcccggccgcagcgcagggaagcctgggggccagaggtcgccgctgccgccatgccgctgctcttcctcgagcgcttcccctggcccagcctccgcacctacacgggcctcagcggcctggccctgctgggcaccatcatcagcgcctaccgcgcgctcagccagcccgaggccggccccggcgagccggaccagctaacggcctcgctgcagcctgagccgccggcgcccgcccggccgagcgccgggggaccccgggcccgcgatgtggcccagtacctgctctcagacagcctcttcgtgtgggttctagtaaataccgcttgctgtgttttgatgttggtggctaagctcatccagtgtattgtgtttggccctcttcgagtgagtgagagacagcatctcaaagacaaattttggaattttattttctacaagttcattttcatctttggtgtgctgaatgtccagacagtggaagaggtggtcatgtggtgcctctggtttgccggacttgtctttctgcacctgatggttcagctctgcaaggatcgatttgaatatctttccttctcgcccaccacgccgatgagcagccacggtcgagtcctgtccctgttggttgccatgctgctttcctgctgtggactggcggccgtctgctccatcaccggctacacccacggaatgcacaccttggctttcatggctgcagagtctcttcttgtgacagtgaggactgctcatgtgattttacgatacgtaattcacctctgggacctcaaccacgaagggacgtgggaaggaaaggggacgtatgtctattacacagactttgtcatggagctcactctcctgtccctggacctcatgcaccatattcacatgttgttatttggcaacatctggttatccatggccagcctggtcatctttatgcagctgcgttacctgtttcatgaggtgcaacgtcgaattcgtcggcacaagaactatctacgtgtggttggaaacatggaggccaggtttgcagttgcaactccagaggagctggctgtcaacaatgacgactgtgccatctgttgggactccatgcaggctgcgcggaaactgccctgtggacatcttttccacaactcctgtcttcgttcctggctagaacaagacacctcctgtccaacatgcagaatgtctcttaatattgccgacaataatcgtgtcagggaagaacatcaaggagagaacttggatgagaatttggttcctgtagcagcagccgaagggagacctcgcttaaaccaacacaatcacttcttccatttcgatgggtctcggattgcgagctggctgccgagtttttcggttgaagtgatgcacaccaccaacattcttggcattacgcaggccagcaactcccagctcaatgcaatggctcatcagattcaagagatgtttccccaggttccataccatctggtactgcaggacctccagctgacacgctcagttgaaataacaacagacaatattttagaaggacggattcaagtaccttttcctacacagcggtcagatagcatcagacctgcattgaacagtcctgtggaaaggccaagcagtgaccaggaagagggagaaacttctgctcagaccgagcgtgtgccactggacctcagtcctcgcctggaggagacgctggacttcggcgaggtggaagtggagcccagtgaggtggaagacttcgaggctcgtgggagccgcttctccaagtctgctgatgagagacagcgcatgctggtgcagcgtaaggacgaactcctccagcaagctcgcaaacgtttcttgaacaaaagttctgaagatgatgcggcctcagagagcttcctcccctcggaaggtgcgtcctctgaccccgtgaccctgcgtcgaaggatgctggctgccgccgcggaacggaggcttcagaagcagcagacctcctagcgctcccttgccttcctcagctgcctcctgcgccctgtgcccgactgactggaggaggcctgtcccaattctgcccgctccatggaaaagcgggcttgactgcattgccgctgtataaagcatgtggtcttatagtgtttggacagctgataaatttaatccttctttgtaatactttctatgtgacatttctcttccccttagaaacactgcaaattttaactgtaggtatgatctcttctggtgttgactggactgcttggggtgggggacgatcaggaggaagtgagcagtcgcctgcctgcagcaggcagcttctactcctgcctcatgcatacgtcccacaaatgcaggtgtcctgagcaccacacccagtgggaagagtgtgggggaggcgcacagtgtgagcccgcccccacgtcgtggggtaacatctgttatcaaactgctgtcgttgttgtggaagcatgtagactgtgccagaggccagacccacgggctcatgcacccctgagccagcagggcatcttggaaaaggaactcttggttcgatacctggagcagaggaggggaaagtccagggctatagggtgtgatgaagtcacccctttctgtcccactacatctgggactgactttccgagcctccagtccaaagccggcttgatttccgtgaactctggtgctcctgcatctcatgagtgtgccccatgggtcccctcccctctcagcatttccttgtcccgtctggacctggggagtggttaggcagcaagctttggtttatggttttcattcattggtgaagtaaattaggcagtgctaaagcctgtgggtttggtccttgaacaagatgtgggccttgcaagatgggagagtaaaccttgaagggctttattaaagaaataaaaaagaacttttgtatcttttatcctgggagcactgcgttttcctagctgtgttattcctggtttaattcagcagagaaggtaaggtgtgaacctacctgccttggagagggcccaggtcccaaatctcttcaaattcttcacatgtttaactttaaggatttgaaccatgaagtcataggttacagacctcagttttatgccccattggattacttttttttttttttttttttttttttttttactctttgaaagctttgttttgtggtagtccttttgggaagaatccagtattatctacaattattggcaaagtttaaatgtattttacataacggaaagtttttagaatgttgaaaagtaattgaaaaaggtgataggtaaatttttaggcaaagataatttatttcaataaatctttcaaaagccttaccttgaaatgctgttagtaaatttctgtgatttttttttttaatttgttttgctgagagcatagctatttgtttttattgtaaaacaataataataataaaaagcaaactcta

SEQ ID NO: 292 - protein, 643 aa, Homo sapiens
MPLLFLERFPWPSLRTYTGLSGLALLGTIISAYRALSQPEAGPGEPDQLTASLQPEPPAPARPSAGGPRARDVAQYLLSDSLFVWVLVNTACCVLMLVAKLIQCIVFGPLRVSERQHLKDKFWNFIFYKFIFIFGVLNVQTVEEVVMWCLWFAGLVFLHLMVQLCKDRFEYLSFSPTTPMSSHGRVLSLLVAMLLSCCGLAAVCSITGYTHGMHTLAFMAAESLLVTVRTAHVILRYVIHLWDLNHEGTWEGKGTYVYYTDFVMELTLLSLDLMHHIHMLLFGNIWLSMASLVIFMQLRYLFHEVQRRIRRHKNYLRVVGNMEARFAVATPEELAVNNDDCAICWDSMQAARKLPCGHLFHNSCLRSWLEQDTSCPTCRMSLNIADNNRVREEHQGENLDENLVPVAAAEGRPRLNQHNHFFHFDGSRIASWLPSFSVEVMHTTNILGITQASNSQLNAMAHQIQEMFPQVPYHLVLQDLQLTRSVEITTDNILEGRIQVPFPTQRSDSIRPALNSPVERPSSDQEEGETSAQTERVPLDLSPRLEETLDFGEVEVEPSEVEDFEARGSRFSKSADERQRMLVQRKDELLQQARKRFLNKSSEDDAASESFLPSEGASSDPVTLRRRMLAAAAERRLQKQQTS

SEQ ID NO: 293 - DNA, 3262 bp, Homo sapiens
gggccgccgcagaggcccggccgcagcgcagggaagcctgggggccagaggtcgccgctgccgccatgccgctgctcttcctcgagcgcttcccctggcccagcctccgcacctacacgggcctcagcggcctggccctgctgggcaccatcatcagcgcctaccgcgcgctcagccagcccgaggccggccccggcgagccggaccagctaacggcctcgctgcagcctgagccgccggcgcccgcccggccgagcgccgggggaccccgggcccgcgatgtggcccagtacctgctctcagacagcctcttcgtgtgggttctagtaaataccgcttgctgtgttttgatgttggtggctaagctcatccagtgtattgtgtttggccctcttcgagtgagtgagagacagcatctcaaagacaaattttggaattttattttctacaagttcattttcatctttggtgtgctgaatgtccagacagtggaagaggtggtcatgtggtgcctctggtttgccggacttgtctttctgcacctgatggttcagctctgcaaggatcgatttgaatatctttccttctcgcccaccacgccgatgagcagccacggtcgagtcctgtccctgttggttgccatgctgctttcctgctgtggactggcggccgtctgctccatcaccggctacacccacggaatgcacaccttggctttcatggctgcagagtctcttcttgtgacagtgaggactgctcatgtgattttacgatacgtaattcacctctgggacctcaaccacgaagggacgtgggaaggaaaggggacgtatgtctattacacagactttgtcatggagctcactctcctgtccctggacctcatgcaccatattcacatgttgttatttggcaacatctggttatccatggccagcctggtcatctttatgcagctgcgttacctgtttcatgaggtgcaacgtcgaattcgtcggcacaagaactatctacgtgtggttggaaacatggaggccaggtttgcagttgcaactccagaggagctggctgtcaacaatgacgactgtgccatctgttgggactccatgcaggctgcgcggaaactgccctgtggacatcttttccacaaggtctcggattgcgagctggctgccgagtttttcggttgaagtgatgcacaccaccaacattcttggcattacgcaggccagcaactcccagctcaatgcaatggctcatcagattcaagagatgtttccccaggttccataccatctggtactgcaggacctccagctgacacgctcagttgaaataacaacagacaatattttagaaggacggattcaagtaccttttcctacacagcggtcagatagcatcagacctgcattgaacagtcctgtggaaaggccaagcagtgaccaggaagagggagaaacttctgctcagaccgagcgtgtgccactggacctcagtcctcgcctggaggagacgctggacttcggcgaggtggaagtggagcccagtgaggtggaagacttcgaggctcgtgggagccgcttctccaagtctgctgatgagagacagcgcatgctggtgcagcgtaaggacgaactcctccagcaagctcgcaaacgtttcttgaacaaaagttctgaagatgatgcggcctcagagagcttcctcccctcggaaggtgcgtcctctgaccccgtgaccctgcgtcgaaggatgctggctgccgccgcggaacggaggcttcagaagcagcagacctcctagcgctcccttgccttcctcagctgcctcctgcgccctgtgcccgactgactggaggaggcctgtcccaattctgcccgctccatggaaaagcgggcttgactgcattgccgctgtataaagcatgtggtcttatagtgtttggacagctgataaatttaatccttctttgtaatactttctatgtgacatttctcttccccttagaaacactgcaaattttaactgtaggtatgatctcttctggtgttgactggactgcttggggtgggggacgatcaggaggaagtgagcagtcgcctgcctgcagcaggcagcttctactcctgcctcatgcatacgtcccacaaatgcaggtgtcctgagcaccacacccagtgggaagagtgtgggggaggcgcacagtgtgagcccgcccccacgtcgtggggtaacatctgttatcaaactgctgtcgttgttgtggaagcatgtagactgtgccagaggccagacccacgggctcatgcacccctgagccagcagggcatcttggaaaaggaactcttggttcgatacctggagcagaggaggggaaagtccagggctatagggtgtgatgaagtcacccctttctgtcccactacatctgggactgactttccgagcctccagtccaaagccggcttgatttccgtgaactctggtgctcctgcatctcatgagtgtgccccatgggtcccctcccctctcagcatttccttgtcccgtctggacctggggagtggttaggcagcaagctttggtttatggttttcattcattggtgaagtaaattaggcagtgctaaagcctgtgggtttggtccttgaacaagatgtgggccttgcaagatgggagagtaaaccttgaagggctttattaaagaaataaaaaagaacttttgtatcttttatcctgggagcactgcgttttcctagctgtgttattcctggtttaattcagcagagaaggtaaggtgtgaacctacctgccttggagagggcccaggtcccaaatctcttcaaattcttcacatgtttaactttaaggatttgaaccatgaagtcataggttacagacctcagttttatgccccattggattacttttttttttttttttttttttttttttttactctttgaaagctttgttttgtggtagtccttttgggaagaatccagtattatctacaattattggcaaagtttaaatgtattttacataacggaaagtttttagaatgttgaaaagtaattgaaaaaggtgataggtaaatttttaggcaaagataatttatttcaataaatctttcaaaagccttaccttgaaatgctgttagtaaatttctgtgatttttttttttaatttgttttgctgagagcatagctatttgtttttattgtaaaacaataataataataaaaagcaaactcta

SEQ ID NO: 294 - protein, 374 aa, Homo sapiens
MPLLFLERFPWPSLRTYTGLSGLALLGTIISAYRALSQPEAGPGEPDQLTASLQPEPPAPARPSAGGPRARDVAQYLLSDSLFVWVLVNTACCVLMLVAKLIQCIVFGPLRVSERQHLKDKFWNFIFYKFIFIFGVLNVQTVEEVVMWCLWFAGLVFLHLMVQLCKDRFEYLSFSPTTPMSSHGRVLSLLVAMLLSCCGLAAVCSITGYTHGMHTLAFMAAESLLVTVRTAHVILRYVIHLWDLNHEGTWEGKGTYVYYTDFVMELTLLSLDLMHHIHMLLFGNIWLSMASLVIFMQLRYLFHEVQRRIRRHKNYLRVVGNMEARFAVATPEELAVNNDDCAICWDSMQAARKLPCGHLFHKVSDCELAAEFFG

SEQ ID NO: 295 - DNA, 101 bp, Homo sapiens
ccacggaatgcacaccttggctttcatggctgcagaggtgagatactggacgcaggacttgctcagattgtatttctgtctgttttcaaggaagctggatg

SEQ ID NO: 296 - DNA, 101 bp, Homo sapiens
actctagtgagagtgagttcatggagctgtggagggggaatgtggtcccggcagtggtcttcctcagtcctgaagcttgcaaggcttagggcacgagtaca

SEQ ID NO: 297 - DNA, 101 bp, Homo sapiens
ttgaaagctttgttttgtggtagtccttttgggaagaatccagtattatctacaattattggcaaagtttaaatgtattttacataacggaaagtttttag

SEQ ID NO: 298 - DNA, 101 bp, Homo sapiens
agtgagcagtcgcctgcctgcagcaggcagcttctactcctgcctcatgcatacgtcccacaaatgcaggtgtcctgagcaccacacccagtgggaagagt

SEQ ID NO: 299 - DNA, 1154 bp, Homo sapiens
actgttgcctctccttgcataatgctgacatcacgttgtagtagtggtaaacctgtgcctggattgcatttcaattgtgctagccctaatagactaggaatgccaatttcagagaggaggactagagcaagattgagaaagaaacagaacagaacaggcactgtcctgagtcctgttgaaggtgagaggagagagttgtataccctcggaacattgcttctagaggtttataatcccagtgctaggaggatctttgagagtaagggatgaaaatataatgcatattgttatactcagtaaattaaatgacacggatctctaaatatcacctcatgctcatatttgggttattggagaataggaccatatagtaatgggatgcttttctgtgcttagcacagaaccctaagcagagaagccaagattgaccttgaatttctcagtgaagtttaacacttccatgaagaagaatgagcagtttcctactgtgtgcatttcagctttccttctcgcccaccacgccgatgagcagccacggtcgagtcctgtccctgttggttgccatgctgctttcctgctgtggactggcggccgtctgctccatcaccggctacacccacggaatgcacaccttggctttcatggctgcagaggtgagatactggakgcaggacttgctcagattgtatttctgtctgttttcaaggaagctggatgtttgacaagttattttcacccatgaaatgacaggtggatatttggtctttcattttaacaagcatttcagttcctttttgtgtgttgggtactggtactgaatgcttttgtgtggtattttatgtaactctttctttacgtagggtataaagattttacaaaataatgaataaactgtactcatcattttgaaggaaaaatctggtctattcatgaatattttaagatttaaaaatttttcactcttttaaacctttctgaaaataccaatttctgttcagtagaaataaaaattctccagcctggccaatatggtgaaaccctgtctctactaaaaatacaaaaaaaaaattagttgggcgtggtggcgcacgtctgtagtcccacctgcttgggaagctgaggcaggagaattgcttgaacccgggaggcggagg

SEQ ID NO: 300 - DNA, 1085 bp, Homo sapiens
ctcaggcaatgaaatacagacactggccagccagcactgaggtggcgagaccttactggctggtccccagagtgtctgcagcattgtgtgagatcttaaactggctagaaggacggtaacagcagcacctgtttcataggacgtgaagatagacgagacagccatgtcccagttttccttggtgccatgccgaagttaggtgttcagtcagtgttctctgctgttatcattgtttttgttgtctaattactgttattcaaaaggaaactaaagtgggaccagttgctgactctcaaacttggaactctaggttaggccccaggctcctttgtcttgcttttaatctttatggcattttaatttctgtggtgcagtagacttccttagagttacaggttggattgggtaccatagctccctctgcacaccagggtttccctgagtctgtgatttgatttctgtgtgactctggactgtttttggtactgtttctcttccagcggtcagatagcatcagacctgcattgaacagtcctgtggaaaggccaagcagtgaccaggaagagggagaaacttctgctcaggtaaaacccgcactctagtgagagtgagttcatggagctgtggagggggaatgtggtcccgkcagtggtcttcctcagtcctgaagcttgcaaggcttagggcacgagtacaaaagaaactgtgctgtatccatcccaataatgaagggtagcaaatcaggctgtgcccgtggtgtggcctgtgtttccacgcagggctggcagtcattccctggggattgccctcatgtgctggaagagaaaggggttgtgttccccggggccagccctgccaccttgagcctgagtgagagcccgtggaaggacagaaggaagctgggctcgggaccgtgagggtgcctggacccatctaaactcagatggggatggcctagggcaagctctccagggagccgaggccattgagatgccctcccccacacctcacttgtcaaactcaggatttccagatacatccatgcattttgcaaaactgagaccgcctgagctgagtggggctgg

SEQ ID NO: 301 - DNA, 3658 bp, Homo sapiens
ctgtaaataaataaataaatagatgcctagcagttttcctttttacctctgttttcagagtcaattgaggatataaaatttgtgcagaagattggataagactggtttaaatgtttgagcaattagtagaagtgaacagaaaattcccaggatgtaaactcacggttgtcgtgttggtagcgtattctaagagtgcagcttgaaggtgcttacgtttttcatgctggtaatcatttacttaccctctgatgccgaacattctgtgtgagtcaggtcctgttcttagtactactcaagccataggcagcaggcctgccctcagggaagctgctgctccattatccgtagcttgtggttcctagtttctgcctccctgcttggcagcagccttctctttgcgtccagaacagccgtgtctggggtgccctgtaggtgaggaacctgcttaggagggaggcctgtgctcacagctgcctccttgcttcctgccccgtgtccagaccgagcgtgtgccactggacctcagtcctcgcctggaggagacgctggacttcggcgaggtggaagtggagcccagtgaggtggaagacttcgaggctcgtgggagccgcttctccaagtctgctgatgagagacagcgcatgctggtgcagcgtaaggacgaactcctccagcaagctcgcaagtgagtcgcttctccagaccacctggcataatccagatcaaaaactagtggctgaaggccgttgtcaggccgtcttctctttttaaacagatgccaacagtgaaacggcattacatgccaccccaaaactcagatttcaagcctctcttgaaaaaaccagagcatctggtaacactgggccccactggtctacctctgatgctggtactgtcagtcatctcccatggacccctttggccacgcttgccgagagagcacttgtgtgctaacctgatctaagccctttatatgaattactttaacagctctaagagggagcactgttaacccattcagctgacatacagctgaagaaatggaggctggagaggttagcactggcctggccctggcgtctgtctcccaggtcctccctgttgaccactctgcctttcagctgagcattgtacacacactcagcgcatctgtgcgtcacacacccatggttggtggcagctacagcaggtgtgtcctgtggatagagggggttttgttccagctcttaaggacagggccagcactgtgttcctcaagtgggtttgggccctggcagaccctgtgattgtgggagttctgtgctgtgtctgtgggtggaggggatgggcaggaagagacagcagggaacagcactgaagggttcctccctggtgcagagagaatttgcgcccatctgttgggggctggatgtcttggtcattgggtggtgctgagtgacagcttcatgaaggtgcctggacatggggagatgtgaaatcaaccttctggctgtgttccacagctccccatctctcctatgagagagaaaaagtcttctgttttttctagacgtttcttgaacaaaagttctgaagatgatgcggcctcagagagcttcctcccctcggaaggtgcgtcctctgaccccgtgaccctgcgtcgaaggatgctggctgccgccgcggaacggaggcttcagaagcagcagacctcctagcgctcccttgccttcctcagctgcctcctgcgccctgtgcccgactgactggaggaggcctgtcccaattctgcccgctccatggaaaagcgggcttgactgcattgccgctgtataaagcatgtggtcttatagtgtttggacagctgataaatttaatccttctttgtaatactttctatgtgacatttctcttccccttagaaacactgcaaattttaactgtaggtatgatctcttctggtgttgactggactgcttggggtgggggacgatcaggaggaagtgagcagtcgcctgcctgcagcaggcagcttctactcctgcctcatgcrtacgtcccacaaatgcaggtgtcctgagcaccacacccagtgggaagagtgtgggggaggcgcacagtgtgagcccgcccccacgtcgtggggtaacatctgttatcaaactgctgtcgttgttgtggaagcatgtagactgtgccagaggccagacccacgggctcatgcacccctgagccagcagggcatcttggaaaaggaactcttggttcgatacctggagcagaggaggggaaagtccagggctatagggtgtgatgaagtcacccctttctgtcccactacatctgggactgactttccgagcctccagtccaaagccggcttgatttccgtgaactctggtgctcctgcatctcatgagtgtgccccatgggtcccctcccctctcagcatttccttgtcccgtctggacctggggagtggttaggcagcaagctttggtttatggttttcattcattggtgaagtaaattaggcagtgctaaagcctgtgggtttggtccttgaacaagatgtgggccttgcaagatgggagagtaaaccttgaagggctttattaaagaaataaaaaagaacttttgtatcttttatcctgggagcactgcgttttcctagctgtgttattcctggtttaattcagcagagaaggtaaggtgtgaacctacctgccttggagagggcccaggtcccaaatctcttcaaattcttcacatgtttaactttaaggatttgaaccatgaagtcataggttacagacctcagttttatgccccattggattactttttttttttttttttttttttttttttttactctttgaaagctttgttttgtggtagtccttttgggaagaatccagtattatcyacaattattggcaaagtttaaatgtattttacataacggaaagtttttagaatgttgaaaagtaattgaaaaaggtgataggtaaatttttaggcaaagataatttatttcaataaatctttcaaaagccttaccttgaaatgctgttagtaaatttctgtgatttttttttttaatttgttttgctgagagcatagctatttgtttttattgtaaaacaataataataataaaaagcaaactctattggtgtgttgtgtgtggctggaagctaaggcatgtttttgtgtggctggaagctaaggcatctttttccagaggtgccaacgttaaaccccattttgatttggattttgtgtatactattttggttggagggttttttcccatgtttttgaattgggaacttttgtttttcctagtagtgtatttggggaaggcagaactacatttttcttccccttgtatttatatctttttttttttcaggtaagtgtgtagcgaaagattattttactgtcctcgaattacattatacttcacacgttgcacccattgtaggtgccactaattccacatgttcacaggtttctgatgtgtgaaaagagaaaattacttggatcaattttagagggtcttgacacattacaaaacagccatatcacagtgtttagagcaggagcttattaagtagcttaaaatgatgcaagaagtgaagttctcagtccgcccttccattttacacctgga

SEQ ID NO: 302 - DNA, 99 bp, Homo sapiens
ctgatctcacaatgctgaaattagcagcattagaaagtaataaaatccargacctggaaaagaaggagggacgtatagatgatttgctcagggctaact

SEQ ID NO: 303 - DNA, 99 bp, Homo sapiens
ctttcactggttatattaaagggagagctattatttctaaatactttacrcctttgacaaaatgagctgcttgtgttgaaatcagttgaattcactaaa

SEQ ID NO: 304 - DNA, 99 bp, Homo sapiens
acaaaataatttcagatttcaaataaggtaatgataatcttatggaaggwctgagctcaactatttgccagaaatcttttttcttggtatgaaatacta

SEQ ID NO: 305 - DNA, 99 bp, Homo sapiens
aggagttcgagaccagcctgggcaaactagcaagatccctgtctctaccyaaatttttatttaattgaaaattattccaaaatcaaaattttgtctaga

SEQ ID NO: 306 - DNA, 99 bp, Homo sapiens
ttttttttcttttttttcctaattcccagggtgatggtaaaaacccatgytatttctttagcagcagttggtggagggtgtgagggtgaggtacagggc

SEQ ID NO: 307 - DNA, 99 bp, Homo sapiens
tggagacgttgcctccgcgcccttcctaactttggaagctaaaaatgagrgggggtggaggagagagaaggccgtgcggaaaaagagcaaggttgtccc

SEQ ID NO: 308 - DNA, 99 bp, Homo sapiens
ggaggctaactatgtaatctgtaagcctgaatgacccaccatgaaataartctaactgttgctaagctatctatagattctacaatgaagaaaatcaaa

SEQ ID NO: 309 - DNA, 99 bp, Homo sapiens
gaagtgaattgcttttttttttttttaccaggaacttaatggagcagaartattaacggtatcttgtaggacagcttttcctaactttatttttattgt

SEQ ID NO: 310 - DNA, 99 bp, Homo sapiens
agggaaagattaattctgactgaagaagcttcagacataaaaagtgatamggaattgtggtttaaaaagagggtagaacattcaaaggtaaagatggtc

SEQ ID NO: 311 - DNA, 99 bp, Homo sapiens
acttcctcatataaactacatttgcagagaagctgctatatttgaatgasaaattttcagtttgcaatagaaaaataccccctctctagttagaagaat

SEQ ID NO: 312 - DNA, 99 bp, Homo sapiens
aagtaaggttataacattcacacaaaaatcaaacagcaatgtaattaaaytttaagagtaaattaatctaggtgaactgtactatacaactaaaacaca

SEQ ID NO: 313 - DNA, 99 bp, Homo sapiens
aatatttattaagtgcctgccatatgtcaggcactggtctaggctttacrgatacagcaagaacaaaaccaagtccttgcactcatgaagcttacattc

SEQ ID NO: 314 - DNA, 99 bp, Homo sapiens
ttccctctcaaaacatcatctgtaaagctaaaggttcaattaatatctcrgaaagtcagaattagaataatatattacattctatagatgactgctaat

SEQ ID NO: 315 - DNA, 99 bp, Homo sapiens
tctggtcactagttcaaaaagacactcactgaaagcagattataacattrtatcagcgctatcactacaactcttagttactgttgaatcttatgcctt

SEQ ID NO: 316 - DNA, 99 bp, Homo sapiens
catcagtcagtaaaccctgcccagttacacagtttccagtaagtgtttargtgcctaatgcacagatatgaacaaagtccaatatcactcaaaaaattc

SEQ ID NO: 317 - DNA, 99 bp, Homo sapiens
aactggaaagcatgtttctggattggaaagacacatttttaaaaaatcamgcacaatggcttaaagaaaaccaaaccaagatacatcagaataaataat

SEQ ID NO: 318 - DNA, 99 bp, Homo sapiens
atgagtactttaaagtatatgctaaggaaatgaagcaactagatgggtamatttttttttacgtgatgttaacaggttagaagttaggaaaattagtaa

SEQ ID NO: 319 - DNA, 99 bp, Homo sapiens
actagcaaaccaaatccagcaacatataaaaaggattatacactttgagmaaacagtattcattccaggaatgcaaggttagttcaacatacaccagct

SEQ ID NO: 320 - DNA, 99 bp, Homo sapiens
tcaacaaatggtgcagggaaaactggatatccacatgcaaataaattgarttggatccttactttaaccatataaaaaaattaactcaaaatggatcaa

SEQ ID NO: 321 - DNA, 99 bp, Homo sapiens
cctgaaaaatgaagaaaatatgggtgcatgctacaacacggagatctccraagatatgctaagtaaaataagccagtcacaaaaggtggttgccagggg

SEQ ID NO: 322 - DNA, 99 bp, Homo sapiens
tcagttttacaagctttgtaaattactccaactaagccttttgctgctcygtatgtattctatcaccaccgcttgcagcacatccttacagattccact

SEQ ID NO: 323 - DNA, 99 bp, Homo sapiens
taattgaacatgtatacctagattcagggacctgactttctatacttacygttgtcagaggtgggggtgaaatcttcgggaagtgtgtgtctgtgttta

SEQ ID NO: 324 - DNA, 99 bp, Homo sapiens
gcttccttatatagaaaatggagataataaaagtacataccttatagagytgttaaagtaaaataagtttctatgaatagttttgaactaaatctgtca

SEQ ID NO: 325 - DNA, 99 bp, Homo sapiens
tcaagctagagaagaaaattagtccaaagaaatttaagtaatcttaacayaaaaactatcacactccttgtagtttgtaaatactatagtaagccttgg

SEQ ID NO: 326 - DNA, 99 bp, Homo sapiens
attttaacagcagttaaactggaggaaaactgtgtaactcccttctgtakggagtactttgttcacaacctctgtggcagaaatacaatttccttcctt

SEQ ID NO: 327 - DNA, 99 bp, Homo sapiens
cccaatactgataacagatatcaagagataattcaacactatgtcctcartatccagttcacggcctggctcacagtaatggctcaataaatattcgag

SEQ ID NO: 328 - DNA, 99 bp, Homo sapiens
atttaataaataaacttctatattctaacaatgaaagctcagcgttgggwtaagatgaaagggggaaacgtctgtcaatgtattccgcatgtttaatgg

SEQ ID NO: 329 - DNA, 99 bp, Homo sapiens
gtcactcagaagcctccctcctatcctctcaagggtaaccactgtcctgrtttttaacccatagaatgatttgcctgtttttaaactttatataaatgg

SEQ ID NO: 330 - DNA, 99 bp, Homo sapiens
gagcccgacaaggaggggctcgggagccagcagtgcaatttgctcctgasgggggtgttccaggacctgcaggggttcttccgatagcctctctccagc

SEQ ID NO: 331 - DNA, 99 bp, Homo sapiens
gataatttctttctgaacctagcctacacaaagaaatccaaaagcgtgasgaagtgtgtgctctcccccttcccctcatggaattaactttgtaggacc

SEQ ID NO: 332 - DNA, 99 bp, Homo sapiens
gaattctgggcttttctgtttctgtagcattgtgttagatttgttttttyccttggttttccagtcctggtggtagattgctaaacttttataaaatct

SEQ ID NO: 333 - DNA, 99 bp, Homo sapiens
gtctattacacgctcaatcttttgatgatgtcctaagaaataatgacttyactcacaaaatactagaatactgtgctgaatatgcagggtgcttggaaa

SEQ ID NO: 334 - DNA, 99 bp, Homo sapiens
aacatacaattttttccctccttattaagtcaagaactttcacattttcrcttaaaagaagtactttactgcttctcattggcatattcaaattgccag

SEQ ID NO: 335 - DNA, 99 bp, Homo sapiens
aaatgtagtttatactttattaaaagtgtgaatgagcttatacctggtgrgccagttcatgggccacagtcattgtgatgccaagcttacttgatgcag

SEQ ID NO: 336 - DNA, 99 bp, Homo sapiens
gagaaaacacaaagcaaaaacggctaattaacatatgttcagtgcatatrttcagtctcattagtgatgaaagaaatacaaatttaagaaatatgtcat

SEQ ID NO: 337 - DNA, 99 bp, Homo sapiens
ttgatgtatgctgttagctgcagtacaactaaacatctgccagactcacktgtgtgttcttgaagctactatggtacattaatgtcctcccccactgtc

SEQ ID NO: 338 - DNA, 99 bp, Homo sapiens
ttgtggataatcctgccttttcacttctctgcatcttttaagcctatatrgatttccaccgaaagcccaaagttacttttttactgactttcctggtag

SEQ ID NO: 339 - DNA, 99 bp, Homo sapiens
cctcaggaatctaaggccgctgctccagctcctgtgtcggaggctgtgtstcggacctccatgtgtagtatacagtcagcaccccctgagccggctacc

SEQ ID NO: 340 - DNA, 99 bp, Homo sapiens
taaacagatacaatattgccacaacaatgtgcagaaacctttttgataawaaaaaattgttctttgcctctaagtggatatttgcaattattttctctc

SEQ ID NO: 341 - DNA, 99 bp, Homo sapiens
caactgtgtctttagagctattgccacattagcctttgcactgtatagcrtctggctttatggaacttaagtttaccaaatataaaaagaaacttctgc

SEQ ID NO: 342 - DNA, 99 bp, Homo sapiens
cagtagggtgacagatactgccgctcttctcctgatcttccattcctagscttctcttctctgaccctgtctactcccctgccccagccccagatgtct

SEQ ID NO: 343 - DNA, 99 bp, Homo sapiens
catttgtttcttgaatccaggcactgcgggagttggtattaaaataccgygaggacatcattaatgtgcggacagcagcagaccacgtagaagaaaagc

SEQ ID NO: 344 - DNA, 99 bp, Homo sapiens
gggagaagatggagagatactccaataagagggaatggatggcacgcacyaaaaacacatgcagcaacagtggcatgttcggctggcctacagcacagc

SEQ ID NO: 345 - DNA, 99 bp, Homo sapiens
tcacaccccaggaggtctgtataaagataactctggtctttaaagcatcrggtttcaggtagaggtgaagagagaatgaatcaaactcaaactgccatc

SEQ ID NO: 346 - DNA, 99 bp, Homo sapiens
tcaggcttgctctgccccaggtttctgaacgtggaatacatttctccagkgaaactcagtattatgagatttgggaggtggaagttaggccacagccat

SEQ ID NO: 347 - DNA, 99 bp, Homo sapiens
ccatcagctgtttcttggggacctggttgaaagatgttttgagagctctyagatcaactcaccagaaagatgattactttgtggagtctcccagcagtg

SEQ ID NO: 348 - DNA, 99 bp, Homo sapiens
tatacataggagatacacacacacacacgcacatttcccatattttgggmaaaaatttgcatatttttatggctttaacataattaatagttttagtct

SEQ ID NO: 349 - DNA, 99 bp, Homo sapiens
tttgttataagaggtactagctcgtagatgacatgaggattctaagctasggtggacacaacttccacaggtgtaaattcagctccttgtacctgagtt

SEQ ID NO: 350 - DNA, 99 bp, Homo sapiens
tacttaagtactttaaaaaatcattttctaccatctttcttatcaggagsctctagtgattccttctccacacttctaacttctcatcttcacactcct

SEQ ID NO: 351 - DNA, 99 bp, Homo sapiens
caacatcagcagaggcttcctgtgggttcctgatcttttaaaattagggktctgcagtgacttctgctcctccagaccccctaacagttttaagggcta

SEQ ID NO: 352 - DNA, 99 bp, Homo sapiens
gcttcctgtgggttcctgatcttttaaaattagggttctgcagtgacttstgctcctccagaccccctaacagttttaagggctaattccctgtaatat

SEQ ID NO: 353 - DNA, 99 bp, Homo sapiens
cttgaaatatatattaaaacagaatttgaaatatatattatatatatacrcacacacatatacatacacacacacacatattcttaaatgcataatcca

SEQ ID NO: 354 - DNA, 99 bp, Homo sapiens
agactcatgaaaaattcatcagagatagtcaagaaaaaccaaaacctgtmcctgataaggaaaataaaaaactgctctgcagaaagtgcaaagccttgg

SEQ ID NO: 355 - DNA, 99 bp, Homo sapiens
gggaaagctgctccctttgtgtcctgtctgcagacctcaaggctaacggragtataaactatataaagtaacatttatttcttcagatgactggggagg

SEQ ID NO: 356 - DNA, 99 bp, Homo sapiens
tgctatgcattaaaattggtttgaattctgtccacaggtccattaactcrgcctttggaggaaggcatttaacataatgcctgccaagctccctaacac

SEQ ID NO: 357 - DNA, 99 bp, Homo sapiens
tgtaccaaaggggaaattactctctgagtgttttgggaagtggccttccrggtcacacaaacactgggtagcaaatgacagctgctatgcattaaaatt

SEQ ID NO: 358 - DNA, 99 bp, Homo sapiens
gcttatcaataacttatgaaataataatccagattgtaccaaaggggaamttactctctgagtgttttgggaagtggccttccaggtcacacaaacact

SEQ ID NO: 359 - DNA, 99 bp, Homo sapiens
gctcataacaaccccttgaggtaggtaccatgattatctgtgctttaaaytgagaagtgaagcataaagaggtcatattactcctttaggtcacacagt

SEQ ID NO: 360 - DNA, 99 bp, Homo sapiens
attaattattaataataaactaatggggagttctagttaatggagtaccrtcctttattgctgtatattgccaattatagattcccaataaaacatact

SEQ ID NO: 361 - DNA, 99 bp, Homo sapiens
taatctgaggcaaagaacaggtgggtctcacttattttacaattggaggraaaaaaaaaatagattcacccaaagtccagaggatccatgcacctgact

SEQ ID NO: 362 - DNA, 99 bp, Homo sapiens
agagtaggtttaaaaactgtggtgtgcattcttcttggattaacatctcygtttttttaatggtgtacctttcttctagagagcagaaattatccatca

SEQ ID NO: 363 - DNA, 99 bp, Homo sapiens
cacactgttcatacaatattaatgagaaaacccacatacacagacataascaaatgttggaatgcaacactcattaaatctgtatttaggtatgtacat

SEQ ID NO: 364 - DNA, 99 bp, Homo sapiens
aatatatggtgattccaatttctccacatccttgccaacactttttattmcctatcttttattatagccttcctaatgagtgtgaagtagtatctcatt

SEQ ID NO: 365 - DNA, 99 bp, Homo sapiens
ctgtcagcagagaaagcaccaaatctagtgagaaaaagtttcagcatatsttaaaatgacagaaaccaccttatccaacctagacttttctgccatggg

SEQ ID NO: 366 - DNA, 99 bp, Homo sapiens
ttaacggttggttagtgtagtaaattttgcttaacactagcttttctgcrtctcagagctactttaagttgtctggcaatgttcccaaataagggtaac

SEQ ID NO: 367 - DNA, 99 bp, Homo sapiens
tttatacccccttttgttatgtgaacagtcattgatgattattgtttatrttcattcctttgtgaggtattgcaagatggtgatacccaaatgctacca

SEQ ID NO: 368 - DNA, 99 bp, Homo sapiens
atatcgatttcagaaagatgagagagtatgcactatggcagaagtgacgrgaatggagagaggagatgaatttgagagatcttaaggtatagaaacaat

SEQ ID NO: 369 - DNA, 99 bp, Homo sapiens
ctttcagttccccaaaggaactgcatctttcctcagactgaagctaggcrctttcttctgttttaagggcctatctggtactctgcttcccctttagtc

SEQ ID NO: 370 - DNA, 99 bp, Homo sapiens
ttggatttgatgtttttaatcaacttatgtgcatgctttatcatataaargtattcaagttttcctgccatacttataatagtttttctgtatttattt

SEQ ID NO: 371 - DNA, 99 bp, Homo sapiens
aaatccatttcactcattcaactgacatatgtaacactgctataggccaraccctttgctgggctctggagaggcactccttgttcttaaggtgctctg

SEQ ID NO: 372 - DNA, 99 bp, Homo sapiens
aatacatttaagaaatacattggtttgtttcagaaaggtaggagaactcmaagtgagggctaccaggctataggtaaatttaaatgttttctgtttgac

SEQ ID NO: 373 - DNA, 99 bp, Homo sapiens
ctggaagtgcgaactgggcagagcccaccgcagctcagcaagccctactrcctctacactccatctctgtgggcaggacttagctgaacaaaaggcagc

SEQ ID NO: 374 - DNA, 99 bp, Homo sapiens
acagtgggttcccagctcaaaaggctaagagagataaaagtcagagagaytgtggtataatggtgcatggtagggtactgggtaaagggattgaaagct

SEQ ID NO: 375 - DNA, 99 bp, Homo sapiens
ttcttcagctcaactatgtcagaacttgggatcagttttttccactatckttgtgatctttttgtgctaaggtatgttactgctccaagcaccatatca

SEQ ID NO: 376 - DNA, 99 bp, Homo sapiens
taaagtcaacctccccatcagacattcaaggctttcaatgatccatggcygccagctctctccaggctcatatcccactccactcctctgatgtttcct

SEQ ID NO: 377 - DNA, 99 bp, Homo sapiens
gtgagcagtcgcctgcctgcagcaggcagcttctactcctgcctcatgcrtacgtcccacaaatgcaggtgtcctgagcaccacacccagtgggaagag

SEQ ID NO: 378 - DNA, 99 bp, Homo sapiens
tcctggtttagaaaaaaaaaaagggttggatctgcatttttataatctcrgtagttttgtgtgcatttcccccctttagagaattactcttttaattac

SEQ ID NO: 379 - DNA, 99 bp, Homo sapiens
tgggcgcaaattctctctgcaccagggaggaacccttcagtgctgttccstgctgtctcttcctgcccatcccctccacccacagacacagcacagaac

SEQ ID NO: 380 - DNA, 99 bp, Homo sapiens
ggcacccaaagtgggtcaacaaacagatctggttctcaagaaagccatgytttccccccagccccactcagctcaggcggtctcagttttgcaaaatgc

SEQ ID NO: 381 - DNA, 99 bp, Homo sapiens
gtactcgtgccctaagccttgaaagcttcaggactgaggaagaccactgycgggaccacattccccctccacagctccatgaactcactctcactagag

SEQ ID NO: 382 - DNA, 99 bp, Homo sapiens
tactttcatccaagcagctctggattttttttccacatatgtaaattaaytctataaatgtttacattcaaggttttatttttggaaaagttctaataa

SEQ ID NO: 383 - DNA, 99 bp, Homo sapiens
cttcctggtatggtctatttcttcagctcccactcatttcaatctaccayaatctactgtccaacccctcgggcaatggaaaatgctggttcttttcca

SEQ ID NO: 384 - DNA, 99 bp, Homo sapiens
tttacattcctgtgttttaaattttgaaacgttcattttatttctgtggyggataatctaaccttttctgaacactactaggttcactctgttgtgatc

SEQ ID NO: 385 - DNA, 99 bp, Homo sapiens
ggcttgtagactaacagcaccaagaagtctgctgcttctgttatttcccraagaaaacaggagcctaagatacaacagcaccaagaattggctgtaaaa

SEQ ID NO: 386 - DNA, 99 bp, Homo sapiens
aacacaagcatccctggaattttgttagcagtagtgctattcgcatcccygatttgagtttcaagaatggagtacagtggggatggtgtcgtgttggtg

SEQ ID NO: 387 - DNA, 99 bp, Homo sapiens
cacttatctcattgatactttaaaattcataaatatgcctggttcattcrcttttgactcctccattcgactgtaagctacaggaaagcaatgaccaca

SEQ ID NO: 388 - DNA, 99 bp, Homo sapiens
gcctaagtttactcattttagttttttaataacagcagatcccagagtaygtcagaatgtatgtttgtaaactgctaatagagtggtggagaggaaagg

SEQ ID NO: 389 - DNA, 99 bp, Homo sapiens
cgagaaggaaagctgaaatgcacacagtaggaaactgctcattcttcttyatggaagtgttaaacttcactgagaaattcaaggtcaatcttggcttct

SEQ ID NO: 390 - DNA, 99 bp, Homo sapiens
atgtgaaatggttagacaagtgccatactaggcactaagcacttaaaaamgcatcaaaaagcttccttgctctaaacctccacttaacattttaatcat

SEQ ID NO: 391 - DNA, 99 bp, Homo sapiens
aaatctgaaatgctccaaaatccaaaactttctgagcaccaacatggcgycacaagtggaaaattccacacctgacctcatgtgacgagtcgcagtcaa

SEQ ID NO: 392 - DNA, 99 bp, Homo sapiens
ctctgccctctcctcttcgtcggaagaaaatccgctaacaatcccatgcytgaccaagtgggaaaagctttcaacttcactctacttcgtccaaccctc

SEQ ID NO: 393 - DNA, 99 bp, Homo sapiens
caaataggtccttcatttccattatgactgatagacttaatttcctgccrtctttgtgggatggtggttctgacttggtttgatttaaagggaataaaa

SEQ ID NO: 394 - DNA, 99 bp, Homo sapiens
atatacctttgacatcacccaatattcaggaaaatagccctgtgactggyaccatactaatcaaaagttcatttctattaaaaacccttttttccttaa

SEQ ID NO: 395 - DNA, 99 bp, Homo sapiens
agccacagatttgaaactaaaagcatggtatacatctttagttttacaayaaacccaaaagttcaaggaactttgagaaaacacaaatagaggtatcct

SEQ ID NO: 396 - DNA, 99 bp, Homo sapiens
cacggaatgcacaccttggctttcatggctgcagaggtgagatactggaygcaggacttgctcagattgtatttctgtctgttttcaaggaagctggat

SEQ ID NO: 397 - DNA, 99 bp, Homo sapiens; identical to SEQ ID NO: 381

SEQ ID NO: 398 - DNA, 99 bp, Homo sapiens; identical to SEQ ID NO: 378

SEQ ID NO: 399 - DNA, 99 bp, Homo sapiens; identical to SEQ ID NO: 377

SEQ ID NO: 400 - DNA, 99 bp, Homo sapiens; identical to SEQ ID NO: 379

SEQ ID NO: 401 - DNA, 99 bp, Homo sapiens; identical to SEQ ID NO: 380

SEQ ID NO: 402 - DNA, 99 bp, Homo sapiens; identical to SEQ ID NO: 382

SEQ ID NO: 403 - DNA, 99 bp, Homo sapiens; identical to SEQ ID NO: 383

SEQ ID NO: 404 - DNA, 99 bp, Homo sapiens; identical to SEQ ID NO: 384

SEQ ID NO: 405 - DNA, 99 bp, Homo sapiens; identical to SEQ ID NO: 385

SEQ ID NO: 406 - DNA, 99 bp, Homo sapiens; identical to SEQ ID NO: 386

SEQ ID NO: 407 - DNA, 99 bp, Homo sapiens; identical to SEQ ID NO: 387

SEQ ID NO: 408 - DNA, 99 bp, Homo sapiens; identical to SEQ ID NO: 388

SEQ ID NO: 409 - DNA, 99 bp, Homo sapiens; identical to SEQ ID NO: 389

SEQ ID NO: 410 - DNA, 99 bp, Homo sapiens; identical to SEQ ID NO: 390

SEQ ID NO: 411 - DNA, 99 bp, Homo sapiens; identical to SEQ ID NO: 391

SEQ ID NO: 412 - DNA, 99 bp, Homo sapiens; identical to SEQ ID NO: 392

SEQ ID NO: 413 - DNA, 99 bp, Homo sapiens; identical to SEQ ID NO: 393

SEQ ID NO: 414 - DNA, 99 bp, Homo sapiens; identical to SEQ ID NO: 394

SEQ ID NO: 415 - DNA, 99 bp, Homo sapiens; identical to SEQ ID NO: 394
